(19) United States
(12) Patent Application Publication
(10) Pub. No.: US 2017/0044540 A1
(43) Pub. Date: Feb. 16, 2017

(54) SARNA COMPOSITIONS AND METHODS OF USE

(71) Applicant: MINA THERAPEUTICS LIMITED, London (GB)

(72) Inventors: Pål Sætrom, Trondheim (NO); Endre Bakken Stovner, Trondheim (NO)

(73) Assignee: MINA THERAPEUTICS LIMITED, London (GB)

(21) Appl. No.: 15/305,910

(22) PCT Filed: Apr. 22, 2015
(86) PCT No.: PCT/GB2015/051189

§ 371 Date: Oct. 21, 2016

Related U.S. Application Data
(60) Provisional application No. 61/982,429, filed on Apr. 22, 2014.

(51) Int. Cl. C12N 15/113

(52) U.S. Cl. CPC C12N 15/113; C12N 2310/113; C12N 2310/14

(57) ABSTRACT

The invention relates to a saRNAs useful in upregulating the expression of a target gene and therapeutic compositions comprising the saRNA. Methods of using the saRNA and the therapeutic compositions are also provided.

### CROSS-REFERENCE TO RELATED APPLICATIONS

[0001] This application claims priority to U.S. Prov. Application No. 61/982,429 filed Apr. 22, 2013, entitled saRNA Compositions and Method of Use, the contents of which are incorporated herein by reference in its entirety.

### REFERENCE TO SEQUENCE LISTING

[0002] The present application is being filed along with a Sequence Listing in electronic format. The sequence listing filed, entitled 2058-1014USPROSL, was created on Apr. 7, 2014 and is 700,599 bytes in size. The information in electronic format of the Sequence Listing is incorporated herein by reference in its entirety.

### FIELD OF THE INVENTION

[0003] The invention relates to oligonucleotide, specifically saRNA, compositions for modulating target gene expression and to the methods of using the compositions in diagnostic and therapeutic applications such as treating metabolic disorders, hyperproliferative diseases, and regulating the nervous system and/or immune system.

### BACKGROUND OF THE INVENTION

[0004] Recently it has been discovered that short RNAs can regulate transcription by destructing transcripts that are sense or antisense to a given mRNA and which are presumed to be non-coding transcripts. Destruction of the non-coding transcripts which are sense, or identical to, the given mRNA results in transcriptional repression of that mRNA, whereas destruction of the non-coding transcripts which are antisense to the given mRNA results in transcriptional activation and/or increased expression of the mRNA or the level of protein encoded by the mRNA. By targeting such non-coding transcripts, short RNAs can therefore be used to up-regulate specific genes at either the nucleic acid or protein. Small duplex RNAs have also been discovered to increase gene expression by targeting ncRNAs that overlap gene promoters (Janowski et al., Nature Chemical Biology, vol. 3:166-173 (2007), the contents of which are incorporated herein by reference in their entirety).

[0005] Any short RNA which leads to up-regulation of the expression of a target gene by any mechanism is termed a short activating RNA or small activating RNA (saRNA). Known methods of up-regulating a target gene by use of saRNAs can involve the detection of an RNA transcript which is antisense to the target gene of interest and designing short RNA molecules which down-regulate the identified transcript. For instance, U.S. Pat. No. 8,288,354 to Wahlestedt, the contents of which are incorporated herein by reference in their entirety, discloses a method of modulating expression of a target gene comprising targeting a nucleic acid molecule to a naturally-occurring anti-sense transcript (NAT) of a sense strand of the targeted gene in a target cell, wherein the nucleic acid molecule targeting the NAT is complementary to the NAT. The NAT may be a coding RNA transcript or a non-coding RNA transcript lacking any extensive open reading frame. In another example, WO 2012/065143 to Krieg et al., the contents of which are incorporated herein by reference in their entirety, teaches a method of activating expression of a target gene comprising blocking the binding of a long non-coding RNA (Inc-RNA) to Polycomb repressive complex 2 (PRC2) protein by a single-stranded oligonucleotide, thereby preventing the Inc-RNA from suppressing the target gene.

[0006] There remains, however, a need for compositions and methods for the targeted modulation of genes via activation with saRNA which do not require the a priori identification of a NAT or rely on interactions at the polycomb complex for prophylactic diagnostic and/or therapeutic purposes.

### BRIEF DESCRIPTION OF THE DRAWINGS

[0007] The foregoing and other objects, features and advantages will be apparent from the following description of particular embodiments of the invention, as illustrated in the accompanying drawings in which like reference characters refer to the same parts throughout the different views. The drawings are not necessarily to scale, emphasis instead being placed upon illustrating the principles of various embodiments of the invention.

[0008] FIG. 1 is a schematic illustrating the relationships among the nucleic acid moieties involved in the function of an saRNA of the invention.

[0009] FIG. 2A-2E show transfections of APOA1-saRNAs in HepG2 cells upregulate the expression of APOA1 gene.

[0010] FIG. 3A-3E show transfections of LDLR-saRNAs in AML12 cells upregulate the expression of LDLR gene.

### SUMMARY OF THE INVENTION

[0011] The present invention provides compositions, methods and kits for the design, preparation, manufacture, formulation and/or use of short activating RNA (saRNA) that modulates target gene expression and/or function for therapeutic purposes, including diagnosing and prognosis.

[0012] It is understood by those of skill in the art that the term saRNA may refer to a single saRNA or saRNA in the plural (saRNAs).

[0013] One aspect of the invention provides an saRNA that targets an antisense RNA transcript of a target gene. The antisense RNA transcript of the target gene is referred to thereafter as the target antisense RNA transcript. The target antisense RNA transcript is transcribed from the coding strand of the target gene.

[0014] Non-limited examples of the target gene according to the present invention include apolipoprotein A1 (APOA1), low density lipoprotein (LDLR), dystrophin (DMD), paired box 5 (PAX5), sodium channel voltage-gated type I alpha subunit (SCN1A), iduronidase alpha-L (IDUA), fibronectin type III domain containing 5 (FNDC5), forkhead box A2 (FOXA2), forkhead box P3 (FOXP3), hepatocyte nuclear factor 4, alpha (HNF4A), interferon, gamma (IFNG), interleukin 10 (IL10), interleukin 2 (IL2), LIM homeobox transcription factor I, alpha (LMXIA), meteorin, glial cell differentiation regulator-like (METRNL), nuclear receptor subfamily 4, group A, member 2 (NR4A2), sirtuin I (SIRTI), tyrosine hydroxylase (TH), erythropoietin (EPO), cyclin-dependent kinase inhibitor I B (p27, Kip I) (CDKNIB), MDM2 oncogene, E3 ubiquitin protein ligase (MDM2), interleukin 19 (IL19), chromosome 19 open reading frame 80 (C19orf90), coagulation factor VII (F7), and coagulation factor VIII (F8).

[0015] Another aspect of the invention provides a pharmaceutical composition comprising a saRNA that targets an antisense RNA transcript of a target gene and at least one pharmaceutically acceptable excipient, wherein the expression of the target gene is up-regulated.

[0016] Another aspect of the invention provides a method of modulating the expression of a target gene comprising administering a saRNA that targets an antisense RNA transcript of the target gene. Non-limited examples of the target gene include apolipoprotein A1 (APOA1), low density lipoprotein (LDLR), dystrophin (DMD), paired box 5 (PAX5), sodium channel voltage-gated type I alpha subunit (SCN1A), iduronidase alpha-L (IDUA), fibronectin type III domain containing 5 (FNDC5), forkhead box A2 (FOXA2), forkhead box P3 (FOXP3), hepatocyte nuclear factor 4, alpha (HNF4A), interferon, gamma (IFNG), interleukin 10 (IL10), interleukin 2 (IL2), LIM homeobox transcription factor I, alpha (LMXIA), meteorin, glial cell differentiation regulator-like (METRNL), nuclear receptor subfamily 4, group A, member 2 (NR4A2), sirtuin I (SIRTI), tyrosine hydroxylase (TH), erythropoietin (EPO), cyclin-dependent kinase inhibitor I B (p27, Kip I) (CDKNIB), MDM2 oncogene, E3 ubiquitin protein ligase (MDM2), interleukin 19 (IL19), chromosome 19 open reading frame 80 (C19orf90), coagulation factor VII (F7), and coagulation factor VIII (F8).

[0017] Another aspect of the invention provides treating or preventing a disease comprising administering a saRNA that targets an antisense RNA transcript of a target gene, wherein the target gene is associated with the disease. Non-limited examples of the target gene include apolipoprotein A1 (APOA1), low density lipoprotein (LDLR), dystrophin (DMD), paired box 5 (PAX5), sodium channel voltage-gated type I alpha subunit (SCN1A), iduronidase alpha-L (IDUA), fibronectin type III domain containing 5 (FNDC5), forkhead box A2 (FOXA2), forkhead box P3 (FOXP3), hepatocyte nuclear factor 4, alpha (HNF4A), interferon, gamma (IFNG), interleukin 10 (IL10), interleukin 2 (IL2), LIM homeobox transcription factor I, alpha (LMXIA), meteorin, glial cell differentiation regulator-like (METRNL), nuclear receptor subfamily 4, group A, member 2 (NR4A2), sirtuin I (SIRTI), tyrosine hydroxylase (TH), erythropoietin (EPO), cyclin-dependent kinase inhibitor I B (p27, Kip I) (CDKNIB), MDM2 oncogene, E3 ubiquitin protein ligase (MDM2), interleukin 19 (IL19), chromosome 19 open reading frame 80 (C19orf90), coagulation factor VII (F7), and coagulation factor VIII (F8). Non-limited examples of diseases include a metabolic disorder, a hyperproliferative disorder, an immune disorder and/or a neurological disorder.

[0018] The details of various embodiments of the invention are set forth in the description below. Other features, objects, and advantages of the invention will be apparent from the description and the drawings, and from the claims.

### DETAILED DESCRIPTION

[0019] The present invention provides compositions, methods and kits for modulating target gene expression and/or function for therapeutic purposes. These compositions, methods and kits comprise at least one saRNA that upregulates the expression of a target gene.

I. Design and Synthesis of saRNA

[0020] One aspect of the present invention provides a method to design and synthesize saRNA.

[0021] The terms “small activating RNA”, “short activating RNA”, or “saRNA” in the context of the present invention means a single-stranded or double-stranded RNA that upregulates or has a positive effect on the expression of a specific gene. The saRNA may be single-stranded of 14 to 30 nucleotides. The saRNA may also be double-stranded, each strand comprising 14 to 30 nucleotides. The gene is called the target gene of the saRNA. As used herein, the target gene is a double-stranded DNA comprising a coding strand and a template strand. For example, an saRNA that upregulates the expression of the APOA1 gene is called an “APOA1-saRNA” and the APOA1 gene is the target gene of the APOA1-saRNA. A target gene may be any gene of interest. In some embodiments, a target gene has a promoter region on the template strand.

[0022] By “upregulation” or “activation” of a gene is meant an increase in the level of expression of a gene, or levels of the polypeptide(s) encoded by a gene or the activity thereof, or levels of the RNA transcript(s) transcribed from the template strand of a gene above that observed in the absence of the saRNA of the present invention. The saRNA of the present invention may have a direct upregulating effect on the expression of the target gene.

[0023] The saRNAs of the present invention may have an indirect upregulating effect on the RNA transcript(s) transcribed from the template strand of the target gene and/or the polypeptide(s) encoded by the target gene or mRNA. The RNA transcript transcribed from the target gene is referred to thereafter as the target transcript. The target transcript may be an mRNA of the target gene. The target transcript may exist in the mitochondria. The saRNAs of the present invention may have a downstream effect on a biological process or activity. In such embodiments, an saRNA targeting a first transcript may have an effect (either upregulating or downregulating) on a second, non-target transcript.

### Target Antisense RNA Transcript of a Target Gene

[0024] In one embodiment, the saRNAs of the present invention is designed to be complementary to a target antisense RNA transcript of a target gene, and it may exert its effect on the target gene expression and/or function by down-regulating the target antisense RNA transcript. The target antisense RNA transcript is transcribed from the coding strand of the target gene and may exist in the nucleus of a cell.

[0025] The term “complementary to” in the context means being able to hybridize with the target antisense RNA transcript under stringent conditions.

[0026] The term “antisense” when used to describe a target antisense RNA transcript in the context of the present invention means that the sequence is complementary to a sequence on the coding strand of a gene.

[0027] It is to be understood that thymidine of the DNA is replaced by uridine in RNA and that this difference does not alter the understanding of the terms “antisense” or “complementarity”.

[0028] The target antisense RNA transcript may be transcribed from a locus on the coding strand between up to 100, 80, 60, 40, 20 or 10 kb upstream of a location corresponding to the target gene's transcription start site (TSS) and up to 100, 80, 60, 40, 20 or 10 kb downstream of a location corresponding to the target gene's transcription stop site.

[0029] In one embodiment, the target antisense RNA transcript is transcribed from a locus on the coding strand located within +/−1 kb of the target gene's transcription start site.

[0030] In another embodiment, the target antisense RNA transcript is transcribed from a locus on the coding strand located within +/−500, +/−250 or +/−100 of the target gene's transcription start site.

[0031] In another embodiment, the target antisense RNA transcript is transcribed from a locus on the coding strand located +/−2000 nucleotides of the target gene's transcription start site.

[0032] In another embodiment, the locus on the coding strand is no more than 1000 nucleotides upstream or downstream from a location corresponding to the target gene's transcription start site.

[0033] In another embodiment, the locus on the coding strand is no more than 500 nucleotides upstream or downstream from a location corresponding to the target gene's transcription start site.

[0034] The term “transcription start site” (TSS) as used herein means a nucleotide on the template strand of a gene corresponding to or marking the location of the start of transcription. The TSS may be located within the promoter region on the template strand of the gene.

[0035] The term “transcription stop site” as used herein means a region, which can be one or more nucleotides, on the template strand of a gene, which has at least one feature such as, but not limited to, a region which encodes at least one stop codon of the target transcript, a region encoding a sequence preceding the 3′UTR of the target transcript, a region where the RNA polymerase releases the gene, a region encoding a splice site or an area before a splice site and a region on the template strand where transcription of the target transcript terminates.

[0036] The phrase “is transcribed from a particular locus” in the context of the target antisense RNA transcript of the invention means the transcription of the target antisense RNA transcript starts at the particular locus.

[0037] The target antisense RNA transcript is complementary to the coding strand of the genomic sequence of the target gene, and any reference herein to “genomic sequence” is shorthand for “coding strand of the genomic sequence”.

[0038] The “coding strand” of a gene has the same base sequence as the mRNA produced, except T is replayed by U in the mRNA. The “template strand” of a gene is therefore complementary and antiparallel to the mRNA produced.

[0039] Thus, the target antisense RNA transcript may comprise a sequence which is complementary to a genomic sequence located between 100, 80, 60, 40, 20 or 10 kb upstream of the target gene's transcription start site and 100, 80, 60, 40, 20 or 10 kb downstream of the target gene's transcription stop site.

[0040] In one embodiment, the target antisense RNA transcript comprises a sequence which is complementary to a genomic sequence located between 1 kb upstream of the target gene's transcription start site and 1 kb downstream of the target gene's transcription stop site.

[0041] In another embodiment, the target antisense RNA transcript comprises a sequence which is complementary to a genomic sequence located between 500, 250 or 100 nucleotides upstream of the target gene's transcription start site and ending 500, 250 or 100 nucleotides downstream of the target gene's transcription stop site.

[0042] The target antisense RNA transcript may comprise a sequence which is complementary to a genomic sequence which includes the coding region of the target gene. The target antisense RNA transcript may comprise a sequence which is complementary to a genomic sequence that aligns with the target gene's promoter region on the template strand. Genes may possess a plurality of promoter regions, in which case the target antisense RNA transcript may align with one, two or more of the promoter regions. An online database of annotated gene loci may be used to identify the promoter regions of genes. The terms ‘align’ and ‘alignment’ when used in the context of a pair of nucleotide sequences mean the pair of nucleotide sequences are complementary to each other or have sequence identity with each other.

[0043] The region of alignment between the target antisense RNA transcript and the promoter region of the target gene may be partial and may be as short as a single nucleotide in length, although it may be at least 15 or at least 20 nucleotides in length, or at least 25 nucleotides in length, or at least 30, 35, 40, 45 or 50 nucleotides in length, or at least 55, 60, 65, 70 or 75 nucleotides in length, or at least 100 nucleotides in length. Each of the following specific arrangements is intended to fall within the scope of the term “alignment”:

[0044] a) The target antisense RNA transcript and the target gene's promoter region are identical in length and they align (i.e. they align over their entire lengths).

[0045] b) The target antisense RNA transcript is shorter than the target gene's promoter region and aligns over its entire length with the target gene's promoter region (i.e. it aligns over its entire length to a sequence within the target gene's promoter region).

[0046] c) The target antisense RNA transcript is longer than the target gene's promoter region and the target gene's promoter region is aligned fully by it (i.e. the target gene's promoter region is aligns over its entire length to a sequence within the target antisense RNA transcript).

[0047] d) The target antisense RNA transcript and the target gene's promoter region are of the same or different lengths and the region of alignment is shorter than both the length of the target antisense RNA transcript and the length of the target gene's promoter region.

[0048] The above definition of “align” and “alignment” applies mutatis mutandis to the description of other overlapping, e.g., aligned sequences throughout the description. Clearly, if a target antisense RNA transcript is described as aligning with a region of the target gene other than the promoter region then the sequence of the target antisense RNA transcript aligns with a sequence within the noted region rather than within the promoter region of the target gene.

[0049] In one embodiment, the target antisense RNA transcript is at least 1 kb, or at least 2, 3, 4, 5, 6, 7, 8, 9 or 10, e.g., 20, 25, 30, 35 or 40 kb long.

[0050] In one embodiment, the target antisense RNA transcript comprises a sequence which is at least 75%, or at least 85%, or at least 90%, or at least 95% complementary along its full length to a sequence on the coding strand of the target gene.

[0051] The present invention provides saRNAs targeting the target antisense RNA transcript and may effectively and specifically down-regulate such target antisense RNA transcripts. This can be achieved by saRNA having a high degree of complementarity to a region within the target antisense RNA transcript. The saRNA will have no more than 5, or no more than 4 or 3, or no more than 2, or no more than 1, or no mismatches with the region within the target antisense RNA transcript to be targeted.

[0052] Referring to FIG. 1, as the target antisense RNA transcript has sequence identity with a region of the template strand of the target gene, the target antisense RNA transcript will be in part identical to a region within the template strand of the target gene allowing reference to be made either to the template strand of the gene or to a target antisense RNA transcript. The location at which the saRNA hybridizes or binds to the target antisense RNA transcript (and hence the same location on the template strand) is referred to as the “targeted sequence” or “target site”.

[0053] The antisense strand of the saRNA (whether single- or double-stranded) may be at least 80%, 90%, 95%, 98%, 99% or 100% identical with the reverse complement of the targeted sequence. Thus, the reverse complement of the antisense strand of the saRNA has a high degree of sequence identity with the targeted sequence. The targeted sequence may have the same length, i.e., the same number of nucleotides, as the saRNA and/or the reverse complement of the saRNA.

[0054] In some embodiments, the targeted sequence comprises at least 14 and less than 30 nucleotides.

[0055] In some embodiments, the targeted sequence has 19, 20, 21, 22, or 23 nucleotides.

[0056] In some embodiments, the location of the targeted sequence is situated within a promoter area of the template strand.

[0057] In some embodiments, the targeted sequence is located within a TSS (transcription start site) core of the template stand. A “TSS core” or “TSS core sequence” as used herein, refers to a region between 2000 nucleotides upstream and 2000 nucleotides downstream of the TSS (transcription start site). Therefore, the TSS core comprises 4001 nucleotides and the TSS is located at position 2001 from the 5′ end of the TSS core sequence.

[0058] In some embodiments, the targeted sequence is located between 1000 nucleotides upstream and 1000 nucleotides downstream of the TSS.

[0059] In some embodiments, the targeted sequence is located between 500 nucleotides upstream and 500 nucleotides downstream of the TSS.

[0060] In some embodiments, the targeted sequence is located between 250 nucleotides upstream and 250 nucleotides downstream of the TSS.

[0061] In some embodiments, the targeted sequence is located between 100 nucleotides upstream and 100 nucleotides downstream of the TSS.

[0062] In some embodiments, the targeted sequence is located upstream of the TSS in the TSS core. The targeted sequence may be less than 2000, less than 1000, less than 500, less than 250, or less than 100 nucleotides upstream of the TSS.

[0063] In some embodiments, the targeted sequence is located downstream of the TSS in the TSS core. The targeted sequence may be less than 2000, less than 1000, less than 500, less than 250, or less than 100 nucleotides downstream of the TSS.

[0064] In some embodiments, the targeted sequence is located +/−50 nucleotides surrounding the TSS of the TSS core. In some embodiments, the targeted sequence substantially overlaps the TSS of the TSS core. In some embodiments, the targeted sequence overlaps begins or ends at the TSS of the TSS core. In some embodiments, the targeted sequence overlaps the TSS of the TSS core by 1, 2, 3, 4, 5, 6, 7, 8, 9, 10, 11, 12, 13, 14, 15, 16, 17, 18 or 19 nucleotides in either the upstream or downstream direction.

[0065] The location of the targeted sequence on the template strand is defined by the location of the 5′ end of the targeted sequence. The 5′ end of the targeted sequence may be at any position of the TSS core and the targeted sequence may start at any position selected from position 1 to position 4001 of the TSS core. For reference herein, when the 5′ most end of the targeted sequence from position 1 to position 2000 of the TSS core, the targeted sequence is considered upstream of the TSS and when the 5′ most end of the targeted sequence is from position 2002 to 4001, the targeted sequence is considered downstream of the TSS. When the 5′ most end of the targeted sequence is at nucleotide 2001, the targeted sequence is considered to be a TSS centric sequence and is neither upstream nor downstream of the TSS.

[0066] For further reference, for example, when the 5′ end of the targeted sequence is at position 1600 of the TSS core, i.e., it is the 1600^{th} nucleotide of the TSS core, the targeted sequence starts at position 1600 of the TSS core and is considered to be upstream of the TSS.

[0067] In one embodiment, the saRNA of the present invention may have two strands that form a duplex, one strand being a guide strand. The saRNA duplex is also called a double-stranded saRNA. A double-stranded saRNA or saRNA duplex, as used herein, is a saRNA that includes more than one, and preferably, two, strands in which interstrand hybridization can form a region of duplex structure. The two strands of a double-stranded saRNA are referred to as an antisense strand or a guide strand, and a sense strand or a passenger strand.

[0068] The antisense strand of an saRNA duplex, used interchangeably with antisense strand saRNA or antisense saRNA, has a high degree of complementarity to a region within the target antisense RNA transcript. The antisense strand may have no more than 5, or no more than 4 or 3, or no more than 2, or no more than 1, or no mismatches with the region within the target antisense RNA transcript or targeted sequence. Therefore, the antisense strand has a high degree of complementary to the targeted sequence on the template strand. The sense strand of the saRNA duplex, used interchangeably with sense strand saRNA or sense saRNA, has a high degree of sequence identity with the targeted sequence on the template strand. In some embodiments, the targeted sequence is located within the promoter area of the template strand. In some embodiments, the targeted sequence is located within the TSS core of the template stand.

[0069] The location of the antisense strand and/or sense strand of the saRNA duplex, relative to the targeted sequence is defined by making reference to the TSS core sequence. For example, when the targeted sequence is downstream of the TSS, the antisense saRNA and the sense saRNA start downstream of the TSS. In another example, when the targeted sequence starts at position 200 of the TSS core, the antisense saRNA and the sense saRNA start upstream of the TSS.

[0070] The relationships among the saRNAs, a target gene, a coding strand of the target gene, a template strand of the target gene, a target antisense RNA transcript, a target transcript, a targeted sequence/target site, and the TSS are shown in FIG. 1.

[0071] A “strand” in the context of the present invention means a contiguous sequence of nucleotides, including non-naturally occurring or modified nucleotides. Two or more strands may be, or each form a part of, separate molecules, or they may be connected covalently, e.g., by a linker such as a polyethyleneglycol linker. At least one strand of an saRNA may comprise a region that is complementary to a target antisense RNA. Such a strand is called an antisense or guide strand of the saRNA duplex. A second strand of an saRNA that comprises a region complementary to the antisense strand of the saRNA is called a sense or passenger strand.

[0072] An saRNA duplex may also be formed from a single molecule that is at least partly self-complementary forming a hairpin structure, including a duplex region. In such case, the term “strand” refers to one of the regions of the saRNA that is complementary to another internal region of the saRNA. The guide strand of the saRNA will have no more than 5, or no more than 4 or 3, or no more than 2, or no more than 1, or no mismatches with the sequence within the target antisense RNA transcript.

[0073] In some embodiments, the passenger strand of an saRNA may comprise at least one nucleotide that is not complementary to the corresponding nucleotide on the guide strand, called a mismatch with the guide strand. The mismatch with the guide strand may encourage preferential loading of the guide strand (Wu et al., PLoS ONE, vol. 6 (12):e28580 (2011), the contents of which are incorporated herein by reference in their entirety). In one embodiment, the at least one mismatch with the guide strand may be at 3′ end of the passenger strand. In one embodiment, the 3′ end of the passenger strand may comprise 1-5 mismatches with the guide strand. In one embodiment, the 3′ end of the passenger strand may comprise 2-3 mismatches with the guide strand. In one embodiment, the 3′ end of the passenger strand may comprise 6-10 mismatches with the guide strand.

[0074] A saRNA duplex may have siRNA-like complementarity to a region of a target antisense RNA transcript; that is, 100% complementarity between nucleotides 2-6 from the 5′ end of the guide strand in the saRNA duplex and a region of the target antisense RNA transcript. Other nucleotides of the saRNA may, in addition, have at least 80%, 90%, 95%, 98%, 99% or 100% complementarity to a region of the target antisense RNA transcript. For example, nucleotides 7 (counted from the 5′ end) until the 3′ end of the saRNA may have least 80%, 90%, 95%, 98%, 99% or 100% complementarity to a region of the target antisense RNA transcript.

[0075] The terms “small interfering RNA” or “siRNA” in the context mean a double-stranded RNA typically 20-25 nucleotides long involved in the RNA interference (RNAi) pathway and interfering with or inhibiting the expression of a specific gene. The gene is the target gene of the siRNA. For example, siRNA that interferes the expression of APOA1 gene is called “APOA1-siRNA” and the APOA1 gene is the target gene. An siRNA is usually about 21 nucleotides long, with 3′ overhangs (e.g., 2 nucleotides) at each end of the two strands.

[0076] An siRNA inhibits target gene expression by binding to and promoting the cleavage of one or more RNA transcripts of the target gene at specific sequences. Typically in RNAi the RNA transcripts are mRNA, so cleavage of mRNA results in the down-regulation of gene expression. In the present invention, not willing to be bound with any theory, one of the possible mechanisms is that saRNA of the present invention may modulate the target gene expression by cleavage of the target antisense RNA transcript.

[0077] A double-stranded saRNA may include one or more single-stranded nucleotide overhangs. The term “overhang” or “tail” in the context of double-stranded saRNA and siRNA refers to at least one unpaired nucleotide that protrudes from the duplex structure of saRNA or siRNA. For example, when a 3′-end of one strand of a saRNA extends beyond the 5′-end of the other strand, or vice versa, there is a nucleotide overhang. A saRNA may comprise an overhang of at least one nucleotide; alternatively the overhang may comprise at least two nucleotides, at least three nucleotides, at least four nucleotides, at least five nucleotides or more. A nucleotide overhang may comprise of consist of a nucleotide/nucleoside analog, including a deoxynucleotide/nucleoside. The overhang(s) may be on the sense strand, the antisense strand or any combination thereof. Furthermore, the nucleotide(s) of an overhang can be present on the 5′ end, 3′ end or both ends of either an antisense or sense strand of a saRNA. Where two oligonucleotides are designed to form, upon hybridization, one or more single-stranded overhangs, and such overhangs shall not be regarded as mismatches with regard to the determination of complementarity. For example, a saRNA comprising one oligonucleotide 19 nucleotides in length and another oligonucleotide 21 nucleotides in length, wherein the longer oligonucleotide comprises a sequence of 19 nucleotides that is fully complementary to the shorter oligonucleotide, can yet be referred to as “fully complementary” for the purposes described herein.

[0078] In one embodiment, the antisense strand of a double-stranded saRNA has a 1-10 nucleotide overhang at the 3′ end and/or the 5′ end. In one embodiment, the antisense strand of a double-stranded saRNA has 1-4 nucleotide overhang at its 3′ end, or 1-2 nucleotide overhang at its 3′ end. In one embodiment, the sense strand of a double-stranded saRNA has a 1-10 nucleotide overhang at the 3′ end and/or the 5′ end. In one embodiment, the sense strand of a double-stranded saRNA has 1-4 nucleotide overhang at its 3′ end, or 1-2 nucleotide overhang at its 3′ end. In one embodiment, both the sense strand and the antisense strand of a double-stranded saRNA have 3′ overhangs. The 3′ overhangs may comprise one or more uracils, e.g., the sequences UU or UUU. In one embodiment, one or more of the nucleotides in the overhang is replaced with a nucleoside thiophosphate, wherein the internucleoside linkage is thiophosphate. In one embodiment, the overhang comprises one or more deoxyribonucleoside, e.g., the sequence dTdT or dTdTdT. In one embodiments, the overhang comprises the sequence dT*dT, wherein * is a thiophosphate internucleoside linkage.

[0079] The skilled person will appreciate that it is convenient to define the saRNA of the present invention by reference to the target antisense RNA transcript or the targeted sequence, regardless of the mechanism by which the saRNA modulates the target gene expression. However, the saRNA of the present invention may alternatively be defined by reference to the target gene. The target antisense RNA transcript is complementary to a genomic region on the coding strand of the target gene, and the saRNA of the present invention is in turn complementary to a region of the target antisense RNA transcript, so the saRNA of the present invention may be defined as having sequence identity to a region on the coding strand of the target gene. All of the features discussed herein with respect to the definition of the saRNA of the present invention by reference to the target antisense RNA transcript apply mutatis mutandis to the definition of the saRNA of the present invention by reference to the target gene so any discussion of complementarity to the target antisense RNA transcript should be understood to include identity to the genomic sequence of the target gene. Thus, the saRNA of the present invention may have a high percent identity, e.g. at least 80%, 90%, 95%, 98% or 99%, or 100% identity, to a genomic sequence on the target gene. The genomic sequence may be up to 2000, 1000, 500, 250, or 100 nucleotides upstream or downstream of the target gene's transcription start site. It may align with the target gene's promoter region. Thus, the saRNA may have sequence identity to a sequence that aligns with the promoter region of the target gene.

[0080] In one embodiment, the existence of the target antisense RNA transcript does not need to be determined to design the saRNA of the present invention. In another word, the design of the saRNA does not require the identification of the target antisense RNA transcript. For example, the nucleotide sequence of the TSS core, i.e., the sequence in the region 2000 nucleotides upstream of the target gene's transcription start site to 2000 nucleotides downstream of the target gene's transcription start may be obtained by the genomic sequence of the coding strand of the target gene, by sequencing or by searching in a database. Targeted sequence within the TSS core starting at any position from position 1 to position 4001 of the TSS core on the template strand can be selected and can then be used to design saRNA sequences. As discussed above, the saRNA has a high degree of sequence identity with the reverse complement of the targeted sequence.

[0081] The saRNA sequence's off-target hit number in the whole genome, 0 mismatch (0 mm) hit number, and 1 mismatch (1 mm) hit number are then determined. The term “off-target hit number” refers to the number of other sites in the whole genome that are identical to the saRNA's targeted sequence on the template strand of the target gene. The term “0 mm hit number” refers to the number of known protein coding transcript other than the target transcript of the saRNA, the complement of which the saRNA may hybridize with or bind to with 0 mismatch. In another word, “0 mm hit number” counts the number of known protein coding transcript, other than the target transcript of the saRNA that comprises a region completely identical with the saRNA sequence. The term “1 mm hit number” refers to the number of known protein coding transcript other than the target transcript of the saRNA, the complement of which the saRNA may hybridize with or bind to with 1 mismatch. In another word, “1 mm hit number” counts the number of known protein coding transcript, other than the target transcript of the saRNA that comprises a region identical with the saRNA sequence with only 1 mismatch. In one embodiment, only saRNA sequences that have no off-target hit, no 0 mm hit and no 1 mm hit are selected. For those saRNA sequences disclosed in the present application, each has no off-target hit, no 0 mm hit and no 1 mm hit.

[0082] The method disclosed in US 2013/0164846 filed Jun. 23, 2011 (saRNA algorithm), the contents of which are incorporated herein by reference in their entirety, may also be used to design saRNA. The design of saRNA is also disclosed in U.S. Pat. No. 8,324,181 and U.S. Pat. No. 7,709,566 to Corey et al., US Pat. Pub. No. 2010/0210707 to Li et al., and Voutila et al., Mol Ther Nucleic Acids, vol. 1, e35 (2012), the contents of each of which are incorporated herein by reference in their entirety.

[0083] “Determination of existence” means either searching databases of ESTs and/or antisense RNA transcripts around the locus of the target gene to identify a suitable target antisense RNA transcript, or using RT PCR or any other known technique to confirm the physical presence of a target antisense RNA transcript in a cell.

[0084] In some embodiments, the saRNA of the present invention may be single or, double-stranded. Double-stranded molecules comprise a first strand and a second strand. If double-stranded, each strand of the duplex may be at least 14, or at least 18, e.g. 19, 20, 21 or 22 nucleotides in length. The duplex may be hybridized over a length of at least 12, or at least 15, or at least 17, or at least 19 nucleotides. Each strand may be exactly 19 nucleotides in length. Preferably, the length of the saRNA is less than 30 nucleotides since oligonucleotide duplex exceeding this length may have an increased risk of inducing the interferon response. In one embodiment, the length of the saRNA is 19 to 25 nucleotides. The strands forming the saRNA duplex may be of equal or unequal lengths.

[0085] In one embodiment, the saRNAs of the present invention comprise a sequence of at least 14 nucleotides and less than 30 nucleotides which has at least 80%, 90%, 95%, 98%, 99% or 100% complementarity to the targeted sequence. In one embodiment, the sequence which has at least 80%, 90%, 95%, 98%, 99% or 100% complementarity to the targeted sequence is at least 15, 16, 17, 18 or 19 nucleotides in length, or 18-22 or 19 to 21, or exactly 19.

[0086] The saRNA of the present invention may include a short 3′ or 5′ sequence which is not complementary to the target antisense RNA transcript. In one embodiment, such a sequence is at 3′ end of the strand. The sequence may be 1-5 nucleotides in length, or 2 or 3. The sequence may comprises uracil, so it may be a 3′ stretch of 2 or 3 uracils. The sequence may comprise one or more deoxyribonucleoside, such as dT. In one embodiment, one or more of the nucleotides in the sequence is replaced with a nucleoside thiophosphate, wherein the internucleoside linkage is thiophosphate. As a non-limiting example, the sequence comprises the sequence dT*dT, wherein * is a thiophosphate internucleoside linkage. This non-complementary sequence may be referred to as “tail”. If a 3′ tail is present, the strand may be longer, e.g., 19 nucleotides plus a 3′ tail, which may be UU or UUU. Such a 3′ tail shall not be regarded as mismatches with regard to determine complementarity between the saRNA and the target antisense RNA transcript.

[0087] Thus, the saRNA of the present invention may consist of (i) a sequence having at least 80% complementarity to a region of the target antisense RNA transcript; and (ii) a 3′ tail of 1-5 nucleotides, which may comprise or consist of uracil residues. The saRNA will thus typically have complementarity to a region of the target antisense RNA transcript over its whole length, except for the 3′ tail, if present. Any of the saRNA sequences disclosed in the present application may optionally include such a 3′ tail. Thus, any of the saRNA sequences disclosed in the saRNA Tables and Sequence Listing may optionally include such a 3′ tail. The saRNA of the present invention may further comprise Dicer or Drosha substrate sequences.

[0088] The saRNA of the present invention may contain a flanking sequence. The flanking sequence may be inserted in the 3′ end or 5′ end of the saRNA of the present invention. In one embodiment, the flanking sequence is the sequence of a miRNA, rendering the saRNA to have miRNA configuration and may be processed with Drosha and Dicer. In a non-limiting example, the saRNA of the present invention has two strands and is cloned into a microRNA precursor, e.g., miR-30 backbone flanking sequence.

[0089] The saRNA of the present invention may comprise a restriction enzyme substrate or recognition sequence. The restriction enzyme recognition sequence may be at the 3′ end or 5′ end of the saRNA of the present invention. Non-limiting examples of restriction enzymes include NotI and AscI.

[0090] In one embodiment, the saRNA of the present invention consists of two strands stably base-paired together. In some embodiments, the passenger strand may comprise at least one nucleotide that is not complementary to the corresponding nucleotide on the guide strand, called a mismatch with the guide strand. In one embodiment, the at least one mismatch with the guide strand may be at 3′ end of the passenger strand. In one embodiment, the 3′ end of the passenger strand may comprise 1-5 mismatches with the guide strand. In one embodiment, the 3′ end of the passenger strand may comprise 2-3 mismatches with the guide strand. In one embodiment, the 3′ end of the passenger strand may comprise 6-10 mismatches with the guide strand.

[0091] In some embodiments, the double-stranded saRNA may comprise a number of unpaired nucleotides at the 3′ end of each strand forming 3′ overhangs. The number of unpaired nucleotides forming the 3′ overhang of each strand may be in the range of 1 to 5 nucleotides, or 1 to 3 nucleotides, or 2 nucleotides. The 3′ overhang may be formed on the 3′ tail mentioned above, so the 3′ tail may be the 3′ overhang of a double-stranded saRNA.

[0092] Thus, the saRNA of the present invention may be single-stranded and consists of (i) a sequence having at least 80% complementarity to a region of the target antisense RNA transcript; and (ii) a 3′ tail of 1-5 nucleotides, which may comprise uracil residues. The saRNA of the present invention may have complementarity to a region of the target antisense RNA transcript over its whole length, except for the 3′ tail, if present. As mentioned above, instead of “complementary to the target antisense RNA transcript” the saRNA of the present invention may also be defined as having “identity” to the coding strand of the target gene. The saRNA of the present invention may be double-stranded and consists of a first strand comprising (i) a first sequence having at least 80% complementarity to a region of the target antisense RNA transcript and (ii) a 3′ overhang of 1-5 nucleotides; and a second strand comprising (i) a second sequence that forms a duplex with the first sequence and (ii) a 3′ overhang of 1-5 nucleotides.

[0093] As described herein, the genomic sequence of the target gene may be used to design saRNA of the target gene. The sequence of a target antisense RNA transcript may be determined from the sequence of the target gene for designing saRNA of the target gene. However, the existence of such a target antisense RNA transcript does not need to be determined.

[0094] One aspect of the present invention provides a saRNA that modulates the expression of a target gene. Also provided is a saRNA that modulates the level of a target transcript. In some embodiments, the target transcript is a coding transcript, e.g., mRNA. Another aspect of the present invention provides a saRNA that modulates the level of a protein encoded by the coding target transcript.

[0095] Non-limited examples of target genes include apolipoprotein A1 (APOA1), low density lipoprotein (LDLR), dystrophin (DMD), paired box 5 (PAX5), sodium channel voltage-gated type I alpha subunit (SCN1A), iduronidase alpha-L (IDUA), fibronectin type III domain containing 5 (FNDC5), forkhead box A2 (FOXA2), forkhead box P3 (FOXP3), hepatocyte nuclear factor 4, alpha (HNF4A), interferon, gamma (IFNG), interleukin 10 (IL10), interleukin 2 (IL2), LIM homeobox transcription factor I, alpha (LMXIA), meteorin, glial cell differentiation regulator-like (METRNL), nuclear receptor subfamily 4, group A, member 2 (NR4A2), sirtuin I (SIRTI), tyrosine hydroxylase (TH), erythropoietin (EPO), cyclin-dependent kinase inhibitor I B (p27, Kip I) (CDKNIB), MDM2 oncogene, E3 ubiquitin protein ligase (MDM2), interleukin 19 (IL19), chromosome 19 open reading frame 80 (C19orf90), coagulation factor VII (F7), and coagulation factor VIII (F8). Sequences of these non-limited examples of target genes of saRNA of the present invention are provided in Table 1.

TABLE 1
Sequences of Example Target Genes

| | | mRNA transcribed from the | | |
|---|---|---|---|---|
| | Location on | target gene (target | Protein encoded by the | |
| Target Gene | chromosome | transcript) | target gene | Nature of gene |
| APOA1 | 11q23-q24 | SEQ ID NO. 1 | SEQ ID NO. 7 | Coding |
| human | | (NM_000039) | (NP_000030.1) | |
| APOA1 | 9 25.36 cM | SEQ ID NO. 2 | SEQ ID NO. 8 | Coding |
| mouse | | (NM_009692) | (NP_033822.2) | |
| APOA1 rat | 8q23-q24 | SEQ ID NO. 3 | SEQ ID NO. 9 | Coding |
| | | (NM_012738) | (NP_036870.1) | |
| LDLR human | 19p13.2 | SEQ ID NO. 4 | SEQ ID NO. 10 | Coding |
| | | (NM_000527) | (NP_000518.1) | |
| LDLR mouse | 97.87 cM | SEQ ID NO. 5 | SEQ ID NO. 11 | Coding |
| | | (NM_010700) | (NP_034830.2) | |
| LDLR rat | 8q13 | SEQ ID NO. 6 | SEQ ID NO. 12 | Coding |
| | | (NM_175762) | (NP_786938.1) | |
| DMD human | Xp21.2 | SEQ ID NO. 13 | SEQ ID NO. 49 | Coding |
| | | (NM_000109) | (NP_000100.2) | |
| | | SEQ ID NO. 14 | | |
| | | (NM_004006) | | |
| | | SEQ ID NO. 15 | | |
| | | (NM_004009) | | |
| | | SEQ ID NO. 16 | | |
| | | (NM_004012) | | |
| | | SEQ ID NO. 17 | | |
| | | (NM_004014) | | |
| | | SEQ ID NO. 18 | | |
| | | (NM_004019) | | |
| | | SEQ ID NO. 19 | | |
| | | (NM_004021) | | |
| PAX5 human | 9p13 | SEQ ID NO. 20 | SEQ ID NO. 50 | Coding |
| | | (NM_016734) | (NP_057953.1) | |
| SCN1A | 2q24.3 | SEQ ID NO. 21 | SEQ ID NO. 51 | Coding |
| human | | (NM_001202435) | (NP_001189364.1) | |
| | | SEQ ID NO. 22 | | |
| | | (NM_006920) | | |
| IDUA human | 4p16.3 | SEQ ID NO. 23 | SEQ ID NO. 52 | Coding |
| | | (NM_000203) | (NP_000194.2) | |
| FNDC5 | 1p35.1 | SEQ ID NO. 24 | SEQ ID NO. 53 | Coding |
| human | | (NM_001171941) | (NP_001165412.1) | |
| | | SEQ ID NO. 25 | | |
| | | (NM_153756) | | |
| FOXA2 | 20p11 | SEQ ID NO. 26 | SEQ ID NO. 54 | Coding |
| human | | (NM_021784) | (NP_068556.2) | |
| | | SEQ ID NO. 27 | | |
| | | (NM_153675) | | |
| FOXP3 | Xp11.23 | SEQ ID NO. 28 | SEQ ID NO. 55 | Coding |
| human | | (NM_014009) | (NP_054728.2) | |
| HNF4A | 20q13.12 | SEQ ID NO. 29 | SEQ ID NO. 56 | Coding |
| human | | (NM_000457) | (NP_000448.3) | |
| | | SEQ ID NO. 30 | | |
| | | (NM_175914) | | |
| IFNG human | 12q14 | SEQ ID NO. 31 | SEQ ID NO. 57 | Coding |
| | | (NM_000619) | (NP_000610.2) | |
| IL10 human | 1q31-q32 | SEQ ID NO. 32 | SEQ ID NO. 58 | Coding |
| | | (NM_000572) | (NP_000563.1) | |
| IL2 human | 4q26-q27 | SEQ ID NO. 33 | SEQ ID NO. 59 | Coding |
| | | (NM_000586) | (NP_000577.2) | |
| IL19 human | 1q32.2 | SEQ ID NO. 34 | SEQ ID NO. 60 | Coding |
| | | (NM_013371) | (NP_037503.2) | |
| LMX1A | 1q24.1 | SEQ ID NO. 35 | SEQ ID NO. 61 | Coding |
| human | | (NM_001174069) | (NP_001167540.1) | |
| | | SEQ ID NO. 36 | | |
| | | (NM_177398) | | |
| METRNL | 17q25.3 | SEQ ID NO. 37 | SEQ ID NO. 62 | Coding |
| human | | (NM_001004431) | (NP_001004431.1) | |
| NR4A2 | 2q22-q23 | SEQ ID NO. 38 | SEQ ID NO. 63 | Coding |
| human | | (NM_006186) | (NP_006177.1) | |
| SIRT1 human | 10q21.3 | SEQ ID NO. 39 | SEQ ID NO. 64 | Coding |
| | | (NM_001142498) | (NP_001135970.1) | |
| TH human | 11p15.5 | SEQ ID NO. 40 | SEQ ID NO. 65 | Coding |
| | | (NM_000360) | (NP_000351.2) | |
| EPO human | 7q22 | SEQ ID NO. 41 | SEQ ID NO. 66 | Coding |
| | | (NM_000799) | (NP_000790.2) | |
| CDKN1B | 12p13.1-p12 | SEQ ID NO. 42 | SEQ ID NO. 67 | Coding |
| human | | (NM_004064) | (NP_004055.1) | |
| MDM2 | 12q14.3-q15 | SEQ ID NO. 43 | SEQ ID NO. 68 | Coding |
| human | | (NM_001145337) | (NP_001138809.1) | |
| | | SEQ ID NO. 44 | | |
| | | (NM_002392) | | |
| C19orf80 | 19p13.2 | SEQ ID NO. 45 | SEQ ID NO. 69 | Coding |
| human | | (NM_018687) | (NP_061157.3) | |
| F7 human | 13q34 | SEQ ID NO. 46 | SEQ ID NO. 70 | Coding |
| | | (NM_019616) | (NP_062562.1) | |
| F8 human | Xq28 | SEQ ID NO. 47 | SEQ ID NO. 71 | Coding |
| | | (NM_000132) | (NP_000123.1) | |
| | | SEQ ID NO. 48 | | |
| | | (NM_019863) | | |

[0096] The saRNA of the present invention may be produced by any suitable method, for example synthetically or by expression in cells using standard molecular biology techniques which are well-known to a person of ordinary skill in the art. For example, the saRNA of the present invention may be chemically synthesized or recombinantly produced using methods known in the art.

### Bifunction Oligonucleotides

[0097] Bifunction or dual-functional oligonucleotides, e.g., saRNA may be designed to up-regulate the expression of a first gene and down-regulate the expression of at least one second gene. One strand of the dual-functional oligonucleotide activates the expression of the first gene and the other strand inhibits the expression of the second gene. Each strand might further comprise a Dicer substrate sequence.

Chemical Modifications of saRNA

[0098] Herein, in saRNA, the terms “modification” or, as appropriate, “modified” refer to structural and/or chemical modifications with respect to A, G, U or C ribonucleotides. Nucleotides in the saRNAs of the present invention may comprise non-standard nucleotides, such as non-naturally occurring nucleotides or chemically synthesized nucleotides or deoxynucleotides. The saRNA of the present invention may include any useful modification, such as to the sugar, the nucleobase, or the internucleoside linkage (e.g. to a linking phosphate/to a phosphodiester linkage/to the phosphodiester backbone). One or more atoms of a pyrimidine nucleobase may be replaced or substituted with optionally substituted amino, optionally substituted thiol, optionally substituted alkyl (e.g., methyl or ethyl), or halo (e.g., chloro or fluoro). In certain embodiments, modifications (e.g., one or more modifications) are present in each of the sugar and the internucleoside linkage. Modifications according to the present invention may be modifications of ribonucleic acids (RNAs) to deoxyribonucleic acids (DNAs), threose nucleic acids (TNAs), glycol nucleic acids (GNAs), peptide nucleic acids (PNAs), locked nucleic acids (LNAs) or hybrids thereof. In a non-limiting example, the 2′-OH of U is substituted with 2′-OMe.

[0099] In one embodiment, the saRNAs of the present invention may comprise at least one modification described herein.

[0100] In another embodiment, the saRNA is an saRNA duplex and the sense strand and antisense sequence may independently comprise at least one modification. As a non-limiting example, the sense sequence may comprises a modification and the antisense strand may be unmodified. As another non-limiting example, the antisense sequence may comprises a modification and the sense strand may be unmodified. As yet another non-limiting example, the sense sequence may comprises more than one modification and the antisense strand may comprise one modification. As a non-limiting example, the antisense sequence may comprises more than one modification and the sense strand may comprise one modification.

[0101] The saRNA of the present invention can include a combination of modifications to the sugar, the nucleobase, and/or the internucleoside linkage. These combinations can include any one or more modifications described herein or in International Application Publication WO2013/052523 filed Oct. 3, 2012, in particular Formulas (Ia)-(Ia-5), (Ib)-(If), (IIa)-(IIp), (IIb-1), (IIb-2), (IIc-1)-(IIc-2), (IIn-1), (IIn-2), (IVa)-(IVl), and (IXa)-(IXr)), the contents of which are incorporated herein by reference in their entirety.

[0102] The saRNA of the present invention may or may not be uniformly modified along the entire length of the molecule. For example, one or more or all types of nucleotide (e.g., purine or pyrimidine, or any one or more or all of A, G, U, C) may or may not be uniformly modified in the saRNA of the invention. In some embodiments, all nucleotides X in a saRNA of the invention are modified, wherein X may be any one of nucleotides A, G, U, C, or any one of the combinations A+G, A+U, A+C, G+U, G+C, U+C, A+G+U, A+G+C, G+U+C or A+G+C.

[0103] Different sugar modifications, nucleotide modifications, and/or internucleoside linkages (e.g., backbone structures) may exist at various positions in a saRNA. One of ordinary skill in the art will appreciate that the nucleotide analogs or other modification(s) may be located at any position(s) of a saRNA such that the function of saRNA is not substantially decreased. The saRNA of the present invention may contain from about 1% to about 100% modified nucleotides (either in relation to overall nucleotide content, or in relation to one or more types of nucleotide, i.e. any one or more of A, G, U or C) or any intervening percentage (e.g., from 1% to 20%, from 1% to 25%, from 1% to 50%, from 1% to 60%, from 1% to 70%, from 1% to 80%, from 1% to 90%, from 1% to 95%, from 10% to 20%, from 10% to 25%, from 10% to 50%, from 10% to 60%, from 10% to 70%, from 10% to 80%, from 10% to 90%, from 10% to 95%, from 10% to 100%, from 20% to 25%, from 20% to 50%, from 20% to 60%, from 20% to 70%, from 20% to 80%, from 20% to 90%, from 20% to 95%, from 20% to 100%, from 50% to 60%, from 50% to 70%, from 50% to 80%, from 50% to 90%, from 50% to 95%, from 50% to 100%, from 70% to 80%, from 70% to 90%, from 70% to 95%, from 70% to 100%, from 80% to 90%, from 80% to 95%, from 80% to 100%, from 90% to 95%, from 90% to 100%, and from 95% to 100%).

[0104] In some embodiments, the saRNA of the present invention may be modified to be a spherical nucleic acid (SNA) or a circular nucleic acid. The terminals of the saRNA of the present invention may be linked by chemical reagents or enzymes, producing spherical saRNA that has no free ends. Spherical saRNA is expected to be more stable than its linear counterpart and to be resistant to digestion with RNase R exonuclease. Spherical saRNA may further comprise other structural and/or chemical modifications with respect to A, G, U or C ribonucleotides.

[0105] In some embodiments, the saRNA of the present invention may comprise inverted deoxy abasic modifications on the passenger strand. The at least one inverted deoxy abasic modification may be on 5′ end, or 3′ end, or both ends of the passenger strand. The inverted deoxy basic modification may encourage preferential loading of the guide strand.

[0106] The saRNA of the present invention may be modified with any modifications of an oligonucleotide or polynucleotide disclosed in pages 136 to 247 of PCT Publication WO2013/151666 published Oct. 10, 2013, the contents of which are incorporated herein by reference in their entirety.

saRNA Conjugates and Combinations

[0107] Conjugation may result in increased stability and/or half-life and may be particularly useful in targeting the saRNA of the present invention to specific sites in the cell, tissue or organism. The saRNA of the present invention can be designed to be conjugated to other polynucleotides, dyes, intercalating agents (e.g. acridines), cross-linkers (e.g. psoralene, mitomycin C), porphyrins (TPPC4, texaphyrin, Sapphyrin), polycyclic aromatic hydrocarbons (e.g., phenazine, dihydrophenazine), artificial endonucleases (e.g. EDTA), alkylating agents, phosphate, amino, mercapto, PEG (e.g., PEG-40K), MPEG, [MPEG]2, polyamino, alkyl, substituted alkyl, radiolabeled markers, enzymes, haptens (e.g. biotin), transport/absorption facilitators (e.g., aspirin, vitamin E, folic acid), synthetic ribonucleases, proteins, e.g., glycoproteins, or peptides, e.g., molecules having a specific affinity for a co-ligand, or antibodies e.g., an antibody, that binds to a specified cell type such as a cancer cell, endothelial cell, or bone cell, hormones and hormone receptors, non-peptidic species, such as lipids, lectins, carbohydrates, vitamins, cofactors, or a drug. Suitable conjugates for nucleic acid molecules are disclosed in International Publication WO 2013/090648 filed Dec. 14, 2012, the contents of which are incorporated herein by reference in their entirety.

[0108] According to the present invention, saRNA of the present invention may be administered with, or further include one or more of RNAi agents, small interfering RNAs (siRNAs), small hairpin RNAs (shRNAs), long non-coding RNAs (lncRNAs), enhancer RNAs, enhancer-derived RNAs or enhancer-driven RNAs (eRNAs), microRNAs (miRNAs), miRNA binding sites, antisense RNAs, ribozymes, catalytic DNA, tRNA, RNAs that induce triple helix formation, aptamers or vectors, and the like to achieve different functions. The one or more RNAi agents, small interfering RNAs (siRNAs), small hairpin RNAs (shRNAs), long non-coding RNAs (IncRNA), microRNAs (miRNAs), miRNA binding sites, antisense RNAs, ribozymes, catalytic DNA, tRNA, RNAs that induce triple helix formation, aptamers or vectors may comprise at least one modification or substitution.

[0109] In some embodiments, the modification is selected from a chemical substitution of the nucleic acid at a sugar position, a chemical substitution at a phosphate position and a chemical substitution at a base position. In other embodiments, the chemical modification is selected from incorporation of a modified nucleotide; 3′ capping; conjugation to a high molecular weight, non-immunogenic compound; conjugation to a lipophilic compound; and incorporation of phosphorothioate into the phosphate backbone. In one embodiment, the high molecular weight, non-immunogenic compound is polyalkylene glycol, or polyethylene glycol (PEG).

[0110] In one embodiment, saRNA of the present invention may be attached to a transgene so it can be co-expressed from an RNA polymerase II promoter. In a non-limiting example, saRNA of the present invention is attached to green fluorescent protein gene (GFP).

[0111] In one embodiment, saRNA of the present invention may be attached to a DNA or RNA aptamer, thereby producing saRNA-aptamer conjugate. Aptamers are oligonucleotides or peptides with high selectivity, affinity and stability. They assume specific and stable three-dimensional shapes, thereby providing highly specific, tight binding to target molecules. An aptamer may be a nucleic acid species that has been engineered through repeated rounds of in vitro selection or equivalently, SELEX (systematic evolution of ligands by exponential enrichment) to bind to various molecular targets such as small molecules, proteins, nucleic acids, and even cells, tissues and organisms. Nucleic acid aptamers have specific binding affinity to molecules through interactions other than classic Watson-Crick base pairing. Nucleic acid aptamers, like peptides generated by phage display or monoclonal antibodies (mAbs), are capable of specifically binding to selected targets and, through binding, block their targets' ability to function. In some cases, aptamers may also be peptide aptamers. For any specific molecular target, nucleic acid aptamers can be identified from combinatorial libraries of nucleic acids, e.g. by SELEX. Peptide aptamers may be identified using a yeast two hybrid system. A skilled person is therefore able to design suitable aptamers for delivering the saRNAs or cells of the present invention to target cells such as liver cells. DNA aptamers, RNA aptamers and peptide aptamers are contemplated. Administration of saRNA of the present invention to the liver using liver-specific aptamers is preferred.

[0112] As used herein, a typical nucleic acid aptamer is approximately 10-15 kDa in size (20-45 nucleotides), binds its target with at least nanomolar affinity, and discriminates against closely related targets. Nucleic acid aptamers may be ribonucleic acid, deoxyribonucleic acid, or mixed ribonucleic acid and deoxyribonucleic acid. Aptamers may be single-stranded ribonucleic acid, deoxyribonucleic acid or mixed ribonucleic acid and deoxyribonucleic acid. Aptamers may comprise at least one chemical modification.

[0113] A suitable nucleotide length for an aptamer ranges from about 15 to about 100 nucleotides (nt), and in various other embodiments, 15-30 nt, 20-25 nt, 30-100 nt, 30-60 nt, 25-70 nt, 25-60 nt, 40-60 nt, 25-40 nt, 30-40 nt, any of 22, 23, 24, 25, 26, 27, 28, 29, 30, 31, 32, 33, 34, 35, 36, 37, 38, 39 or 40 nt or 40-70 nt in length. However, the sequence can be designed with sufficient flexibility such that it can accommodate interactions of aptamers with two targets at the distances described herein. Aptamers may be further modified to provide protection from nuclease and other enzymatic activities. The aptamer sequence can be modified by any suitable methods known in the art.

[0114] The saRNA-aptamer conjugate may be formed using any known method for linking two moieties, such as direct chemical bond formation, linkage via a linker such as streptavidin and so on.

[0115] In one embodiment, saRNA of the present invention may be attached to an antibody. Methods of generating antibodies against a target cell surface receptor are well known. The saRNAs of the invention may be attached to such antibodies with known methods, for example using RNA carrier proteins. The resulting complex may then be administered to a subject and taken up by the target cells via receptor-mediated endocytosis.

[0116] In one embodiment, saRNA of the present invention may be conjugated with lipid moieties such as a cholesterol moiety (Letsinger et al., Proc. Natl. Acid. Sci. USA, 1989, 86: 6553-6556), cholic acid (Manoharan et al., Biorg. Med. Chem. Let., 1994, 4:1053-1060), a thioether, e.g., beryl-5-tritylthiol (Manoharan et al., Ann. N.Y. Acad. Sci., 1992, 660:306-309; Manoharan et al., Biorg. Med. Chem. Let., 1993, 3:2765-2770), a thiocholesterol (Oberhauser et al., Nucl. Acids Res., 1992, 20:533-538), an aliphatic chain, e.g., dodecandiol or undecyl residues (Saison-Behmoaras et al., EMBO J, 1991, 10:1111-1118; Kabanov et al., FEBS Lett., 1990, 259:327-330; Svinarchuk et al., Biochimie, 1993, 75:49-54), a phospholipid, e.g., di-hexadecyl-rac-glycerol or triethyl-ammonium 1,2-di-O-hexadecyl-rac-glycero-3-Hphosphonate (Manoharan et al., Tetrahedron Lett., 1995, 36:3651-3654; Shea et al., Nucl. Acids Res., 1990, 18:3777-3783), a polyamine or a polyethylene glycol chain (Manoharan et al., Nucleosides & Nucleotides, 1995, 14:969-973), or adamantane acetic acid (Manoharan et al., Tetrahedron Lett., 1995, 36:3651-3654), a palmityl moiety (Mishra et al., Biochim. Biophys. Acta, 1995, 1264:229-237), or an octadecylamine or hexylamino-carbonyloxycholesterol moiety (Crooke et al., J. Pharmacol. Exp. Ther., 1996, 277:923-937), the content of each of which is herein incorporated by reference in its entirety.

[0117] In one embodiment, the saRNA of the present invention is conjugated with a ligand. In one non-limiting example, the ligand may be any ligand disclosed in US 20130184328 to Manoharan et al., the contents of which are incorporated herein by reference in their entirety. The conjugate has a formula of Ligand-[linker]ₒₚₜᵢₒₙ-[tether]ₒₚₜᵢₒₙₐₗ-oligonucleotide agent. The oligonucleotide agent may comprise a subunit having formulae (I) disclosed by US 20130184328 to Manoharan et al., the contents of which are incorporated herein by reference in their entirety. In another non-limiting example, the ligand may be any ligand disclosed in US 20130317081 to Akinc et al., the contents of which are incorporated herein by reference in their entirety, such as a lipid, a protein, a hormone, or a carbohydrate ligand of Formula II-XXVI. The ligand may be coupled with the saRNA with a bivalent or trivalent branched linker in Formula XXXI-XXXV disclosed in Akinc.

[0118] Representative U.S. patents that teach the preparation of such nucleic acid/lipid conjugates include, but are not limited to, U.S. Pat. Nos. 4,828,979; 4,948,882; 5,218,105; 5,525,465; 5,541,313; 5,545,730; 5,552,538; 5,578,717, 5,580,731; 5,591,584; 5,109,124; 5,118,802; 5,138,045; 5,414,077; 5,486,603; 5,512,439; 5,578,718; 5,608,046; 4,587,044; 4,605,735; 4,667,025; 4,762,779; 4,789,737; 4,824,941; 4,835,263; 4,876,335; 4,904,582; 4,958,013; 5,082,830; 5,112,963; 5,214,136; 5,082,830; 5,112,963; 5,214,136; 5,245,022; 5,254,469; 5,258,506; 5,262,536; 5,272,250; 5,292,873; 5,317,098; 5,371,241, 5,391,723; 5,416,203, 5,451,463; 5,510,475; 5,512,667; 5,514,785; 5,565,552; 5,567,810; 5,574,142; 5,585,481; 5,587,371; 5,595,726; 5,597,696; 5,599,923; 5,599,928 and 5,688,941, the content of each of which is herein incorporated by reference in its entirety.

[0119] The saRNA of the present invention may be provided in combination with other active ingredients known to have an effect in the particular method being considered. The other active ingredients may be administered simultaneously, separately, or sequentially with the saRNA of the present invention. In one embodiment, saRNA of the present invention is administered with saRNA modulating a different target gene. Non-limiting examples include saRNA that modulates albumin, insulin or HNF4A genes. Modulating any gene may be achieved using a single saRNA or a combination of two or more different saRNAs. Non-limiting examples of saRNA that can be administered with saRNA of the present invention include saRNA modulating albumin or HNF4A disclosed in International Publication WO 2012/175958 filed Jun. 20, 2012, saRNA modulating insulin disclosed in International Publications WO 2012/046084 and WO 2012/046085 both filed Oct. 10, 2011, saRNA modulating human progesterone receptor, human major vault protein (hMVP), E-cadherin gene, p53 gene, or PTEN gene disclosed in U.S. Pat. No. 7,709,456 filed Nov. 13, 2006 and US Pat. Publication US 2010/0273863 filed Apr. 23, 2010, saRNAs targeting p21 gene disclosed in International Publication WO 2006/113246 filed Apr. 11, 2006, any nucleic acid disclosed in WO2012/065143 filed Nov. 12, 2011 that upregulates the expression of genes in Table 8 of WO 2012/065143 or increases the expression of a tumor suppressor, any oligonucleotide that activates target genes in Table 4 of WO2013/173635 filed May 16, 2013, any oligonucleotide that activates target genes in Table 4 of WO2013/173637 filed May 16, 2013, any oligonucleotide complementary to a sequence selected from the sequences in SEQ ID NOs: 1-1212 ofWO2013/173652 filed May 16, 2013, any oligonucleotide modulating APOA1 and ABCA1 gene expressions disclosed in WO2013173647 filed May 16, 2013, any oligonucleotide modulating SMN family gene expressions disclosed in WO2013173638 filed May 16, 2013, any oligonucleotide modulating PTEN gene expression disclosed in WO2013173605 filed May 16, 2013, any oligonucleotide modulating MECP2 gene expression disclosed in WO2013173608 filed May 16, 2013, any oligonucleotide modulating ATP2A2 gene expression disclosed in WO2013173598 filed May 16, 2013, any oligonucleotide modulating UTRN gene expression disclosed in WO2013173645 filed May 16, 2013, any nucleic acid molecule that modulates the expression of CD97, TS-α, C/EBP delta, CDC23, PINK1, HIF1α, Gnbp3g, Adrenomedullin AM1 receptor, 3-oxoacid CoA transferase, Cathepsin W or BACE1 disclosed in U.S. Pat. No. 8,288,354 filed Dec. 28, 2006, antagoNAT with formula (I) disclosed in US 2013/0245099 filed Nov. 17, 2011, any antagoNAT that upregulates the expression of hemoglobin (HBF/HBG) polynucleotides disclosed in U.S. Pat. No. 8,318,690 filed Apr. 30, 2010, any antisense oligonucleotide that increases the expression of apolipoprotein (ApoAl) polynucleotide disclosed in U.S. Pat. No. 8,153,696 filed Oct. 2, 2009 (CURNA), the contents of each of which are incorporated herein by reference in their entirety.

[0120] In on embodiment, the saRNA is conjugated with a carbohydrate ligand, such as any carbohydrate ligand disclosed in U.S. Pat. Nos. 8,106,022 and 8,828,956 to Manoharan et al. (Alnylam Pharmaceuticals), the contents of which are incorporated herein by reference in their entirety. For example, the carbohydrate ligand may be monosaccharide, disaccharide, trisaccharide, tetrasaccharide, oligosaccharide, or polysaccharide. These carbohydrate-conjugated RNA agents may target the parenchymal cells of the liver. In one embodiment, the saRNA is conjugated with more than one carbohydrate ligand, preferably two or three. In one embodiment, the saRNA is conjugated with one or more galactose moiety. In another embodiment, the saRNA is conjugated at least one (e.g., two or three or more) lactose molecules (lactose is a glucose coupled to a galactose). In another embodiment, the saRNA is conjugated with at least one (e.g., two or three or more) N-Acetyl-Galactosamine (GalNAc), N-Ac-Glucosamine (GluNAc), or mannose (e.g., mannose-6-phosphate). In one embodiment, the saRNA is conjugated with at least one mannose ligand, and the conjugated saRNA targets macrophages.

[0121] In one embodiment, saRNA of the present invention is administered with a small interfering RNA or siRNA that inhibits the expression of a gene.

[0122] In one embodiment, saRNA of the present invention is administered with one or more drugs for therapeutic purposes.

### II. Composition of the Invention

[0123] One aspect of the present invention provides pharmaceutical compositions comprising a small activating RNA (saRNA) that upregulates a target gene, and at least one pharmaceutically acceptable carrier.

Formulation, Delivery. Administration, and Dosing

[0124] Pharmaceutical formulations may additionally comprise a pharmaceutically acceptable excipient, which, as used herein, includes, but is not limited to, any and all solvents, dispersion media, diluents, or other liquid vehicles, dispersion or suspension aids, surface active agents, isotonic agents, thickening or emulsifying agents, preservatives, and the like, as suited to the particular dosage form desired. Various excipients for formulating pharmaceutical compositions and techniques for preparing the composition are known in the art (see Remington: The Science and Practice of Pharmacy, 21^{st} Edition, A. R. Gennaro, Lippincott, Williams & Wilkins, Baltimore, Md., 2006; incorporated herein by reference in its entirety). The use of a conventional excipient medium may be contemplated within the scope of the present disclosure, except insofar as any conventional excipient medium may be incompatible with a substance or its derivatives, such as by producing any undesirable biological effect or otherwise interacting in a deleterious manner with any other component(s) of the pharmaceutical composition.

[0125] In some embodiments, compositions are administered to humans, human patients or subjects. For the purposes of the present disclosure, the phrase “active ingredient” generally refers to saRNA to be delivered as described herein.

[0126] Although the descriptions of pharmaceutical compositions provided herein are principally directed to pharmaceutical compositions which are suitable for administration to humans, it will be understood by the skilled artisan that such compositions are generally suitable for administration to any other animal, e.g., to non-human animals, e.g. non-human mammals. Modification of pharmaceutical compositions suitable for administration to humans in order to render the compositions suitable for administration to various animals is well understood, and the ordinarily skilled veterinary pharmacologist can design and/or perform such modification with merely ordinary, if any, experimentation. Subjects to which administration of the pharmaceutical compositions is contemplated include, but are not limited to, humans and/or other primates; mammals, including commercially relevant mammals such as cattle, pigs, horses, sheep, cats, dogs, mice, and/or rats; and/or birds, including commercially relevant birds such as poultry, chickens, ducks, geese, and/or turkeys.

[0127] Formulations of the pharmaceutical compositions described herein may be prepared by any method known or hereafter developed in the art of pharmacology. In general, such preparatory methods include the step of bringing the active ingredient into association with an excipient and/or one or more other accessory ingredients, and then, if necessary and/or desirable, dividing, shaping and/or packaging the product into a desired single- or multi-dose unit.

[0128] A pharmaceutical composition in accordance with the invention may be prepared, packaged, and/or sold in bulk, as a single unit dose, and/or as a plurality of single unit doses. As used herein, a “unit dose” is discrete amount of the pharmaceutical composition comprising a predetermined amount of the active ingredient. The amount of the active ingredient is generally equal to the dosage of the active ingredient which would be administered to a subject and/or a convenient fraction of such a dosage such as, for example, one-half or one-third of such a dosage.

[0129] Relative amounts of the active ingredient, the pharmaceutically acceptable excipient, and/or any additional ingredients in a pharmaceutical composition in accordance with the invention will vary, depending upon the identity, size, and/or condition of the subject treated and further depending upon the route by which the composition is to be administered. By way of example, the composition may comprise between 0.1% and 100%, e.g., between 0.5 and 50%, between 1-30%, between 5-80%, at least 80% (w/w) active ingredient.

[0130] In some embodiments, the formulations described herein may contain at least one saRNA. As a non-limiting example, the formulations may contain 1, 2, 3, 4 or 5 saRNAs with different sequences. In one embodiment, the formulation contains at least three saRNAs with different sequences. In one embodiment, the formulation contains at least five saRNAs with different sequences.

[0131] The saRNA of the present invention can be formulated using one or more excipients to: (1) increase stability; (2) increase cell transfection; (3) permit the sustained or delayed release (e.g., from a depot formulation of the saRNA); (4) alter the biodistribution (e.g., target the saRNA to specific tissues or cell types); (5) increase the translation of encoded protein in vivo; and/or (6) alter the release profile of encoded protein in vivo.

[0132] In addition to traditional excipients such as any and all solvents, dispersion media, diluents, or other liquid vehicles, dispersion or suspension aids, surface active agents, isotonic agents, thickening or emulsifying agents, preservatives, excipients of the present invention can include, without limitation, lipidoids, liposomes, lipid nanoparticles, polymers, lipoplexes, core-shell nanoparticles, peptides, proteins, cells transfected with saRNA (e.g., for transplantation into a subject), hyaluronidase, nanoparticle mimics and combinations thereof. Accordingly, the formulations of the invention can include one or more excipients, each in an amount that together increases the stability of the saRNA and/or increases cell transfection by the saRNA. Further, the saRNA of the present invention may be formulated using self-assembled nucleic acid nanoparticles. Pharmaceutically acceptable carriers, excipients, and delivery agents for nucleic acids that may be used in the formulation with the saRNA of the present invention are disclosed in International Publication WO 2013/090648 filed Dec. 14, 2012, the contents of which are incorporated herein by reference in their entirety.

[0133] In one embodiment, the saRNA of the present invention comprises two single RNA strands that are 21 nucleotides in length each that are annealed to form a double-stranded saRNA as the active ingredient. The composition further comprises a salt buffer composed of 50 mM Tris-HCl, pH 8.0, 100 mM NaCl and 5 mM EDTA.

[0134] In another embodiment, the saRNA of the present invention may be delivered with dendrimers. Dendrimers are highly branched macromolecules. In one embodiment, the saRNA of the present invention is complexed with structurally flexible poly(amidoamine) (PAMAM) dendrimers for targeted in vivo delivery. The complex is called saRNA-dendrimers. Dendrimers have a high degree of molecular uniformity, narrow molecular weight distribution, specific size and shape characteristics, and a highly-functionalized terminal surface. The manufacturing process is a series of repetitive steps starting with a central initiator core. Each subsequent growth step represents a new generation of polymers with a larger molecular diameter and molecular weight, and more reactive surface sites than the preceding generation.

[0135] PAMAM dendrimers are efficient nucleotide delivery systems that bear primary amine groups on their surface and also a tertiary amine group inside of the structure. The primary amine group participates in nucleotide binding and promotes their cellular uptake, while the buried tertiary amino groups act as a proton sponge in endosomes and enhance the release of nucleic acid into the cytoplasm. These dendrimers protect the saRNA carried by them from ribonuclease degradation and achieves substantial release of saRNA over an extended period of time via endocytosis for efficient gene targeting. The in vivo efficacy of these nanoparticles have previously been evaluated where biodistribution studies show that the dendrimers preferentially accumulate in peripheral blood mononuclear cells and live with no discernible toxicity (see Zhou et al., Molecular Ther. 2011 Vol. 19, 2228-2238, the contents of which are incorporated herein by reference in their entirety). PAMAM dendrimers may comprise a triethanolamine (TEA) core, a diaminobutane (DAB) core, a cystamine core, a diaminohexane (HEX) core, a diamonododecane (DODE) core, or an ethylenediamine (EDA) core. In one embodiment, PAMAM dendrimers comprise a TEA core or a DAB core.

### Lipidoids

[0136] The synthesis of lipidoids has been extensively described and formulations containing these compounds are particularly suited for delivery of oligonucleotides or nucleic acids (see Mahon et al., Bioconjug Chem. 2010 21:1448-1454; Schroeder et al., J Intern Med. 2010 267:9-21; Akinc et al., Nat Biotechnol. 2008 26:561-569; Love et al., Proc Natl Acad Sci USA. 2010 107:1864-1869; Siegwart et al., Proc Natl Acad Sci USA. 2011 108:12996-3001; all of which are incorporated herein in their entireties).

[0137] While these lipidoids have been used to effectively deliver double-stranded small interfering RNA molecules in rodents and non-human primates (see Akinc et al., Nat Biotechnol. 2008 26:561-569; Frank-Kamenetsky et al., Proc Natl Acad Sci USA. 2008 105:11915-11920; Akinc et al., Mol Ther. 2009 17:872-879; Love et al., Proc Natl Acad Sci USA. 2010 107:1864-1869; Leuschner et al., Nat Biotechnol. 2011 29:1005-1010; all of which is incorporated herein in their entirety), the present disclosure contemplates their formulation and use in delivering saRNA. Complexes, micelles, liposomes or particles can be prepared containing these lipidoids and therefore, can result in an effective delivery of the saRNA following the injection of a lipidoid formulation via localized and/or systemic routes of administration. Lipidoid complexes of saRNA can be administered by various means including, but not limited to, intravenous, intramuscular, or subcutaneous routes.

[0138] In vivo delivery of nucleic acids may be affected by many parameters, including, but not limited to, the formulation composition, nature of particle PEGylation, degree of loading, oligonucleotide to lipid ratio, and biophysical parameters such as, but not limited to, particle size (Akinc et al., Mol Ther. 2009 17:872-879; the contents of which are herein incorporated by reference in its entirety). As an example, small changes in the anchor chain length of poly(ethylene glycol) (PEG) lipids may result in significant effects on in vivo efficacy. Formulations with the different lipidoids, including, but not limited to penta[3-(1-laurylaminopropionyl)]-triethylenetetramine hydrochloride (TETA-5LAP; aka 98N12-5, see Murugaiah et al., Analytical Biochemistry, 401:61 (2010); the contents of which are herein incorporated by reference in its entirety), C12-200 (including derivatives and variants), and MD1, can be tested for in vivo activity.

[0139] The lipidoid referred to herein as “98N12-5” is disclosed by Akinc et al., Mol Ther. 2009 17:872-879 and the contents of which is incorporated by reference in its entirety.

[0140] The lipidoid referred to herein as “C12-200” is disclosed by Love et al., Proc Natl Acad Sci USA. 2010 107:1864-1869 and Liu and Huang, Molecular Therapy. 2010 669-670; the contents of both of which are herein incorporated by reference in their entirety. The lipidoid formulations can include particles comprising either 3 or 4 or more components in addition to the saRNA. As an example, formulations with certain lipidoids, include, but are not limited to, 98N12-5 and may contain 42% lipidoid, 48% cholesterol and 10% PEG (C14 alkyl chain length). As another example, formulations with certain lipidoids, include, but are not limited to, C12-200 and may contain 50% lipidoid, 10% disteroylphosphatidyl choline, 38.5% cholesterol, and 1.5% PEG-DMG.

[0141] In one embodiment, a saRNA formulated with a lipidoid for systemic intravenous administration can target the liver. For example, a final optimized intravenous formulation using saRNA and comprising a lipid molar composition of 42% 98N12-5, 48% cholesterol, and 10% PEG-lipid with a final weight ratio of about 7.5 to 1 total lipid to saRNA and a C14 alkyl chain length on the PEG lipid, with a mean particle size of roughly 50-60 nm, can result in the distribution of the formulation to be greater than 90% to the liver. (see, Akinc et al., Mol Ther. 2009 17:872-879; the contents of which are herein incorporated by reference in its entirety). In another example, an intravenous formulation using a C12-200 (see published international application WO2010129709, the contents of which is herein incorporated by reference in their entirety) lipidoid may have a molar ratio of 50/10/38.5/1.5 of C12-200/disteroylphosphatidyl choline/cholesterol/PEG-DMG, with a weight ratio of 7 to 1 total lipid to nucleic acid and a mean particle size of 80 nm may be effective to deliver saRNA (see, Love et al., Proc Natl Acad Sci USA. 2010 107:1864-1869, the contents of which are herein incorporated by reference in its entirety).

[0142] In another embodiment, an MD1 lipidoid-containing formulation may be used to effectively deliver saRNA to hepatocytes in vivo. The characteristics of optimized lipidoid formulations for intramuscular or subcutaneous routes may vary significantly depending on the target cell type and the ability of formulations to diffuse through the extracellular matrix into the blood stream. While a particle size of less than 150 nm may be desired for effective hepatocyte delivery due to the size of the endothelial fenestrae (see, Akinc et al., Mol Ther. 2009 17:872-879, the contents of which are herein incorporated by reference in its entirety), use of a lipidoid-formulated saRNA to deliver the formulation to other cells types including, but not limited to, endothelial cells, myeloid cells, and muscle cells may not be similarly size-limited.

[0143] Use of lipidoid formulations to deliver siRNA in vivo to other non-hepatocyte cells such as myeloid cells and endothelium has been reported (see Akinc et al., Nat Biotechnol. 2008 26:561-569; Leuschner et al., Nat Biotechnol. 2011 29:1005-1010; Cho et al. Adv. Funct. Mater. 2009 19:3112-3118; 8^{h} International Judah Folkman Conference, Cambridge, Mass. Oct. 8-9, 2010; the contents of each of which is herein incorporated by reference in its entirety). Effective delivery to myeloid cells, such as monocytes, lipidoid formulations may have a similar component molar ratio. Different ratios of lipidoids and other components including, but not limited to, disteroylphosphatidyl choline, cholesterol and PEG-DMG, may be used to optimize the formulation of saRNA for delivery to different cell types including, but not limited to, hepatocytes, myeloid cells, muscle cells, etc. For example, the component molar ratio may include, but is not limited to, 50% C12-200, 10% disteroylphosphatidyl choline, 38.5% cholesterol, and %1.5 PEG-DMG (see Leuschner et al., Nat Biotechnol 2011 29:1005-1010; the contents of which are herein incorporated by reference in its entirety). The use of lipidoid formulations for the localized delivery of nucleic acids to cells (such as, but not limited to, adipose cells and muscle cells) via either subcutaneous or intramuscular delivery, may not require all of the formulation components desired for systemic delivery, and as such may comprise only the lipidoid and saRNA.

### Liposomes, Lipoplexes, and Lipid Nanoparticles

[0144] The saRNA of the invention can be formulated using one or more liposomes, lipoplexes, or lipid nanoparticles. In one embodiment, pharmaceutical compositions of saRNA include liposomes. Liposomes are artificially-prepared vesicles which may primarily be composed of a lipid bilayer and may be used as a delivery vehicle for the administration of nutrients and pharmaceutical formulations. Liposomes can be of different sizes such as, but not limited to, a multilamellar vesicle (MLV) which may be hundreds of nanometers in diameter and may contain a series of concentric bilayers separated by narrow aqueous compartments, a small unicellular vesicle (SUV) which may be smaller than 50 nm in diameter, and a large unilamellar vesicle (LUV) which may be between 50 and 500 nm in diameter. Liposome design may include, but is not limited to, opsonins or ligands in order to improve the attachment of liposomes to unhealthy tissue or to activate events such as, but not limited to, endocytosis. Liposomes may contain a low or a high pH in order to improve the delivery of the pharmaceutical formulations.

[0145] The formation of liposomes may depend on the physicochemical characteristics such as, but not limited to, the pharmaceutical formulation entrapped and the liposomal ingredients, the nature of the medium in which the lipid vesicles are dispersed, the effective concentration of the entrapped substance and its potential toxicity, any additional processes involved during the application and/or delivery of the vesicles, the optimization size, polydispersity and the shelf-life of the vesicles for the intended application, and the batch-to-batch reproducibility and possibility of large-scale production of safe and efficient liposomal products.

[0146] In one embodiment, pharmaceutical compositions described herein may include, without limitation, liposomes such as those formed from 1,2-dioleyloxy-N,N-dimethylaminopropane (DODMA) liposomes, DiLa2 liposomes from Marina Biotech (Bothell, Wash.), 1,2-dilinoleyloxy-3-dimethylaminopropane (DLin-DMA), 2,2-dilinoleyl-4-(2-dimethylaminoethyl)-[1,3]-dioxolane (DLin-KC2-DMA), and MC3 (US20100324120; the contents of which are herein incorporated by reference in its entirety) and liposomes which may deliver small molecule drugs such as, but not limited to, DOXIL® from Janssen Biotech, Inc. (Horsham, Pa.).

[0147] In one embodiment, pharmaceutical compositions described herein may include, without limitation, liposomes such as those formed from the synthesis of stabilized plasmid-lipid particles (SPLP) or stabilized nucleic acid lipid particle (SNALP) that have been previously described and shown to be suitable for oligonucleotide delivery in vitro and in vivo (see Wheeler et al. Gene Therapy. 1999 6:271-281; Zhang et al. Gene Therapy. 1999 6:1438-1447; Jeffs et al. Pharm Res. 2005 22:362-372; Morrissey et al., Nat Biotechnol. 2005 2:1002-1007; Zimmermann et al., Nature. 2006 441:111-114; Heyes et al. J Contr Rel. 2005 107:276-287; Semple et al. Nature Biotech. 2010 28:172-176; Judge et al. J Clin Invest. 2009 119:661-673; deFougerolles Hum Gene Ther. 2008 19:125-132; the contents of each of which are incorporated herein in their entireties). The original manufacture method by Wheeler et al. was a detergent dialysis method, which was later improved by Jeffs et al. and is referred to as the spontaneous vesicle formation method. The liposome formulations may be composed of 3 to 4 lipid components in addition to the saRNA. As an example a liposome can contain, but is not limited to, 55% cholesterol, 20% disteroylphosphatidyl choline (DSPC), 10% PEG-S-DSG, and 15% 1,2-dioleyloxy-N,N-dimethylaminopropane (DODMA), as described by Jeffs et al. In another example, certain liposome formulations may contain, but are not limited to, 48% cholesterol, 20% DSPC, 2% PEG-c-DMA, and 30% cationic lipid, where the cationic lipid can be 1,2-distearloxy-N,N-dimethylaminopropane (DSDMA), DODMA, DLin-DMA, or 1,2-dilinolenyloxy-3-dimethylaminopropane (DLenDMA), as described by Heyes et al. In another example, the nucleic acid-lipid particle may comprise a cationic lipid comprising from about 50 mol % to about 85 mol % of the total lipid present in the particle; a non-cationic lipid comprising from about 13 mol % to about 49.5 mol % of the total lipid present in the particle; and a conjugated lipid that inhibits aggregation of particles comprising from about 0.5 mol % to about 2 mol % of the total lipid present in the particle as described in WO2009127060 to Maclachlan et al, the contents of which are incorporated herein by reference in their entirety. In another example, the nucleic acid-lipid particle may be any nucleic acid-lipid particle disclosed in US2006008910 to Maclachlan et al., the contents of which are incorporated herein by reference in their entirety. As a non-limiting example, the nucleic acid-lipid particle may comprise a cationic lipid of Formula I, a non-cationic lipid, and a conjugated lipid that inhibits aggregation of particles.

[0148] In one embodiment, the saRNA of the present invention may be formulated in a lipid vesicle which may have crosslinks between functionalized lipid bilayers.

[0149] In one embodiment, the liposome may contain a sugar-modified lipid disclosed in U.S. Pat. No. 5,595,756 to Bally et al., the contents of which are incorporated herein by reference in their entirety. The lipid may be a ganglioside and cerebroside in an amount of about 10 mol percent.

[0150] In one embodiment, the saRNA of the present invention may be formulated in a liposome comprising a cationic lipid. The liposome may have a molar ratio of nitrogen atoms in the cationic lipid to the phosphates in the saRNA (N:P ratio) of between 1:1 and 20:1 as described in International Publication No. WO2013006825, the contents of which are herein incorporated by reference in its entirety. In another embodiment, the liposome may have a N:P ratio of greater than 20:1 or less than 1:1.

[0151] In one embodiment, the saRNA of the present invention may be formulated in a lipid-polycation complex. The formation of the lipid-polycation complex may be accomplished by methods known in the art and/or as described in U.S. Pub. No. 20120178702, the contents of which are herein incorporated by reference in its entirety. As a non-limiting example, the polycation may include a cationic peptide or a polypeptide such as, but not limited to, polylysine, polyornithine and/or polyarginine and the cationic peptides described in International Pub. No. WO2012013326; herein incorporated by reference in its entirety. In another embodiment, the saRNA may be formulated in a lipid-polycation complex which may further include a neutral lipid such as, but not limited to, cholesterol or dioleoyl phosphatidylethanolamine (DOPE).

[0152] The liposome formulation may be influenced by, but not limited to, the selection of the cationic lipid component, the degree of cationic lipid saturation, the nature of the PEGylation, ratio of all components and biophysical parameters such as size. In one example by Semple et al. (Semple et al. Nature Biotech. 2010 28:172-176; the contents of which are herein incorporated by reference in its entirety), the liposome formulation was composed of 57.1% cationic lipid, 7.1% dipalmitoylphosphatidylcholine, 34.3% cholesterol, and 1.4% PEG-c-DMA.

[0153] In some embodiments, the ratio of PEG in the lipid nanoparticle (LNP) formulations may be increased or decreased and/or the carbon chain length of the PEG lipid may be modified from C14 to C18 to alter the pharmacokinetics and/or biodistribution of the LNP formulations. As a non-limiting example, LNP formulations may contain 1-5% of the lipid molar ratio of PEG-c-DOMG as compared to the cationic lipid, DSPC and cholesterol. In another embodiment the PEG-c-DOMG may be replaced with a PEG lipid such as, but not limited to, PEG-DSG (1,2-Distearoyl-sn-glycerol, methoxypolyethylene glycol) or PEG-DPG (1,2-Dipalmitoyl-sn-glycerol, methoxypolyethylene glycol). The cationic lipid may be selected from any lipid known in the art such as, but not limited to, DLin-MC3-DMA, DLin-DMA, C12-200 and DLin-KC2-DMA.

[0154] In one embodiment, the saRNA of the present invention may be formulated in a lipid nanoparticle such as the lipid nanoparticles described in International Publication No. WO2012170930, the contents of which are herein incorporated by reference in its entirety.

[0155] In one embodiment, the cationic lipid which may be used in formulations of the present invention may be selected from, but not limited to, a cationic lipid described in International Publication Nos. WO2012040184, WO2011153120, WO2011149733, WO2011090965, WO2011043913, WO2011022460, WO2012061259, WO2012054365, WO2012044638, WO2010080724, WO201021865 and WO2008103276, U.S. Pat. Nos. 7,893,302, 7,404,969 and 8,283,333 and US Patent Publication No. US20100036115 and US20120202871; the contents of each of which is herein incorporated by reference in their entirety. In another embodiment, the cationic lipid may be selected from, but not limited to, formula A described in International Publication Nos. WO2012040184, WO2011153120, WO2011149733, WO2011090965, WO2011043913, WO2011022460, WO2012061259, WO2012054365 and WO2012044638; the contents of each of which is herein incorporated by reference in their entirety. In yet another embodiment, the cationic lipid may be selected from, but not limited to, formula CLI-CLXXIX of International Publication No. WO2008103276, formula CLI-CLXXIX of U.S. Pat. No. 7,893,302, formula CLI-CLXXXXII of U.S. Pat. No. 7,404,969 and formula I-VI of US Patent Publication No. US20100036115; the contents of each of which are herein incorporated by reference in their entirety. In yet another embodiment, the cationic lipid may be a multivalent cationic lipid such as the cationic lipid disclosed in U.S. Pat. No. 7,223,887 to Gaucheron et al., the contents of which are incorporated herein by reference in their entirety. The cationic lipid may have a positively-charged head group including two quaternary amine groups and a hydrophobic portion including four hydrocarbon chains as described in U.S. Pat. No. 7,223,887 to Gaucheron et al., the contents of which are incorporated herein by reference in their entirety. In yet another embodiment, the cationic lipid may be biodegradable as the biodegradable lipids disclosed in US20130195920 to Maier et al., the contents of which are incorporated herein by reference in their entirety. The cationic lipid may have one or more biodegradable groups located in a lipidic moiety of the cationic lipid as described in formula I-IV in US 20130195920 to Maier et al., the contents of which are incorporated herein by reference in their entirety.

[0156] As a non-limiting example, the cationic lipid may be selected from (20Z,23Z)-N,N-dimethylnonacosa-20,23-dien-10-amine, (17Z,20Z)-N,N-dimemylhexacosa-17,20-dien-9-amine, (1Z,19Z)-N5N-dimethylpentacosa-16,19-dien-8-amine, (13Z,16Z)-N,N-dimethyldocosa-13,16-dien-5-amine, (12Z,15Z)-N,N-dimethylhenicosa-12,15-dien-4-amine, (14Z,17Z)-N,N-dimethyltricosa-14,17-dien-6-amine, (15Z,18Z)-N,N-dimethyltetracosa-15,18-dien-7-amine, (18Z,21Z)-N,N-dimethylheptacosa-18,21-dien-10-amine, (15Z,18Z)-N,N-dimethyltetracosa-15,18-dien-5-amine, (14Z,17Z)-N,N-dimethyltricosa-14,17-dien-4-amine, (19Z,22Z)-N,N-dimeihyloctacosa-19,22-dien-9-amine, (18Z,21 Z)-N,N-dimethylheptacosa-18,21-dien-8-amine, (17Z,20Z)-N,N-dimethylhexacosa-17,20-dien-7-amine, (16Z,19Z)-N,N-dimethylpentacosa-16,19-dien-6-amine, (22Z,25Z)-N,N-dimethylhentriaconta-22,25-dien-10-amine, (21 Z,24Z)-N,N-dimethyltriaconta-21,24-dien-9-amine, (18Z)-N,N-dimetylheptacos-18-en-10-amine, (17Z)-N,N-dimethylhexacos-17-en-9-amine, (19Z,22Z)-N,N-dimethyloctacosa-19,22-dien-7-amine, N,N-dimethylheptacosan-10-amine, (20Z,23Z)-N-ethyl-N-methylnonacosa-20,23-dien-10-amine, 1-[(11Z,14Z)-1-nonylicosa-11,14-dien-1-yl] pyrrolidine, (20Z)-N,N-dimethylheptacos-20-en-10-amine, (15Z)-N,N-dimethyl eptacos-15-en-10-amine, (14Z)-N,N-dimethylnonacos-14-en-10-amine, (17Z)-N,N-dimethylnonacos-17-en-10-amine, (24Z)-N,N-dimethyltritriacont-24-en-10-amine, (20Z)-N,N-dimethylnonacos-20-en-10-amine, (22Z)-N,N-dimethylhentriacont-22-en-10-amine, (16Z)-N,N-dimethylpentacos-16-en-8-amine, (12Z,15Z)-N,N-dimethyl-2-nonylhenicosa-12,15-dien-1-amine, (13Z,16Z)-N,N-dimethyl-3-nonyldocosa-13,16-dien-1-amine, N,N-dimethyl-1-[(1S,2R)-2-octylcyclopropyl] eptadecan-8-amine, 1-[(1 S,2R)-2-hexylcyclopropyl]-N,N-dimethylnonadecan-10-amine, N,N-dimethyl-1-[(1S,2R)-2-octylcyclopropyl]nonadecan-10-amine, N,N-dimethyl-21-[(1S,2R)-2-octylcyclopropyl]henicosan-10-amine,N,N-dimethyl-1-[(1 S,2S)-2-{[(1R,2R)-2-pentylcyclopropyl]methyl}cyclopropyl]nonadecan-10-amine,N,N-dimethyl-1-[(1 S,2R)-2-octylcyclopropyl]hexadecan-8-amine, N,N-dimethyl-[(1R,2S)-2-undecyIcyclopropyl]tetradecan-5-amine, N,N-dimethyl-3-{7-[(1S,2R)-2-octylcyclopropyl]heptyl}dodecan-1-amine, 1-[(1R,2S)-2-heptylcyclopropyl]-N,N-dimethyloctadecan-9-amine, 1-[(1S,2R)-2-decylcyclopropyl]-N,N-dimethylpentadecan-6-amine, N,N-dimethyl-1-[(S,2R)-2-octylcyclopropyl]pentadecan-8-amine, R—N,N-dimethyl-1-[(9Z,12Z)-octadeca-9,12-dien-1-yloxy]-3-(octyloxy)propan-2-amine, S—N,N-dimethyl-1-[(9Z,12Z)-octadeca-9,12-dien-1-yloxy]-3-(octyloxy)propan-2-amine, 1-{2-[(9Z,12Z)-octadeca-9,12-dien-1-yloxy]-1-[(octyloxy)methyl]ethyl}pyrrolidine, (2S)-N,N-dimethyl-1-[(9Z,12Z)-octadeca-9,12-dien-1-yloxy]-3-[(5Z)-oct-5-en-1-yloxy]propan-2-amine, 1-{2-[(9Z,12Z)-octadeca-9,12-dien-1-yloxy]-1-[(octyloxy)methyl]ethyl}azetidine, (2S)-1-(hexyloxy)-N,N-dimethyl-3-[(9Z,12Z)-octadeca-9,12-dien-1-yloxy]propan-2-amine, (2S)-1-(heptyloxy)-N,N-dimethyl-3-[(9Z,12Z)-octadeca-9,12-dien-1-yloxy]propan-2-amine, N,N-dimethyl-1-(nonyloxy)-3-[(9Z,12Z)-octadeca-9,12-dien-1-yloxy]propan-2-amine, N,N-dimethyl-1-[(9Z)-octadec-9-en-1-yloxy]-3-(octyloxy)propan-2-amine; (2S)-N,N-dimethyl-1-[(6Z,9Z,12Z)-octadeca-6,9,12-trien-1-yloxy]-3-(octyloxy)propan-2-amine, (2S)-1-[(11Z,14Z)-icosa-11,14-dien-1-yloxy]-N,N-dimethyl-3-(pentyloxy)propan-2-amine, (2S)-1-(hexyloxy)-3-[(11Z,14Z)-icosa-11,14-dien-1-yloxy]-N,N-dimethylpropan-2-amine, 1-[(11Z,14Z)-icosa-11,14-dien-1-yloxy]-N,N-dimethyl-3-(octyloxy)propan-2-amine, 1-[(13Z,16Z)-docosa-13,16-dien-1-yloxy]-N,N-dimethyl-3-(octyloxy)propan-2-amine, (2S)-1-[(13Z,16Z)-docosa-13,16-dien-1-yloxy]-3-(hexyloxy)-N,N-dimethylpropan-2-amine, (2S)-1-[(13Z)-docos-13-en-1-yloxy]-3-(hexyloxy)-N,N-dimethylpropan-2-amine, 1-[(13Z)-docos-13-en-1-yloxy]-N,N-dimethyl-3-(octyloxy)propan-2-amine, 1-[(9Z)-hexadec-9-en-1-yloxy]-N,N-dimethyl-3-(octyloxy)propan-2-amine, (2R)-N,N-dimethyl-H(1-metoyloctyl)oxy]-3-[(9Z,12Z)-octadeca-9,12-dien-1-yloxy]propan-2-amine, (2R)-1-[(3,7-dimethyloctyl)oxy]-N,N-dimethyl-3-[(9Z,12Z)-octadeca-9,12-dien-1-yloxy]propan-2-amine, N,N-dimethyl-1-(octyloxy)-3-({8-[(1S,2S)-2-{[(1R,2R)-2-pentylcyclopropyl]methyl}cyclopropyl]octyl}oxy)propan-2-amine, N,N-dimethyl-1-{[8-(2-oclylcyclopropyl)octyl]oxy}-3-(octyloxy)propan-2-amine and (11E,20Z,23Z)-N,N-dimethylnonacosa-11,20,2-trien-10-amine or a pharmaceutically acceptable salt or stereoisomer thereof.

[0157] In one embodiment, the lipid may be a cleavable lipid such as those described in International Publication No. WO2012170889, the contents of which are herein incorporated by reference in their entirety.

[0158] In one embodiment, the nanoparticles described herein may comprise at least one cationic polymer described herein and/or known in the art.

[0159] In one embodiment, the cationic lipid may be synthesized by methods known in the art and/or as described in International Publication Nos. WO2012040184, WO2011153120, WO2011149733, WO2011090965, WO2011043913, WO2011022460, WO2012061259, WO2012054365, WO2012044638, WO2010080724 and WO201021865; the contents of each of which is herein incorporated by reference in their entirety.

[0160] In one embodiment, the LNP formulations of the saRNA may contain PEG-c-DOMG at 3% lipid molar ratio. In another embodiment, the LNP formulations of the saRNA may contain PEG-c-DOMG at 1.5% lipid molar ratio.

[0161] In one embodiment, the pharmaceutical compositions of the saRNA may include at least one of the PEGylated lipids described in International Publication No. 2012099755, the contents of which is herein incorporated by reference in its entirety.

[0162] In one embodiment, the LNP formulation may contain PEG-DMG 2000 (1,2-dimyristoyl-sn-glycero-3-phophoethanolamine-N-[methoxy(polyethylene glycol)-2000). In one embodiment, the LNP formulation may contain PEG-DMG 2000, a cationic lipid known in the art and at least one other component. In another embodiment, the LNP formulation may contain PEG-DMG 2000, a cationic lipid known in the art, DSPC and cholesterol. As a non-limiting example, the LNP formulation may contain PEG-DMG 2000, DLin-DMA, DSPC and cholesterol. As another non-limiting example the LNP formulation may contain PEG-DMG 2000, DLin-DMA, DSPC and cholesterol in a molar ratio of 2:40:10:48 (see e.g., Geall et al., Nonviral delivery of self-amplifying RNA vaccines, PNAS 2012; PMID: 22908294; herein incorporated by reference in its entirety). As another non-limiting example, the saRNA described herein may be formulated in a nanoparticle to be delivered by a parenteral route as described in U.S. Pub. No. 20120207845; the contents of which is herein incorporated by reference in its entirety. The cationic lipid may also be the cationic lipids disclosed in US20130156845 to Manoharan et al. and US 20130129785 to Manoharan et al., WO 2012047656 to Wasan et al., WO 2010144740 to Chen et al., WO 2013086322 to Ansell et al., or WO 2012016184 to Manoharan et al., the contents of each of which are incorporated herein by reference in their entirety.

[0163] In one embodiment, the saRNA of the present invention may be formulated with a plurality of cationic lipids, such as a first and a second cationic lipid as described in US20130017223 to Hope et al., the contents of which are incorporated herein by reference in their entirety. The first cationic lipid can be selected on the basis of a first property and the second cationic lipid can be selected on the basis of a second property, where the properties may be determined as outlined in US20130017223, the contents of which are herein incorporated by reference in its entirety. In one embodiment, the first and second properties are complementary.

[0164] In another embodiment, the saRNA may be formulated with a lipid particle comprising one or more cationic lipids and one or more second lipids, and one or more nucleic acids, wherein the lipid particle comprises a solid core, as described in US Patent Publication No. US20120276209 to Cullis et al., the contents of which are incorporated herein by reference in their entirety.

[0165] In one embodiment, the saRNA of the present invention may be complexed with a cationic amphiphile in an oil-in-water (o/w) emulsion such as described in EP2298358 to Satishchandran et al., the contents of which are incorporated herein by reference in their entirety. The cationic amphiphile may be a cationic lipid, modified or unmodified spermine, bupivacaine, or benzalkonium chloride and the oil may be a vegetable or an animal oil. As a non-limiting example, at least 10% of the nucleic acid-cationic amphiphile complex is in the oil phase of the oil-in-water emulsion (see e.g., the complex described in European Publication No. EP2298358 to Satishchandran et al., the contents of which are herein incorporated by reference in its entirety).

[0166] In one embodiment, the saRNA of the present invention may be formulated with a composition comprising a mixture of cationic compounds and neutral lipids. As a non-limiting example, the cationic compounds may be formula (I) disclosed in WO 1999010390 to Ansell et al., the contents of which are disclosed herein by reference in their entirety, and the neutral lipid may be selected from the group consisting of diacylphosphatidylcholine, diacylphosphatidylethanolamine, ceramide and sphingomyelin. In another non-limiting example, the lipid formulation may comprise a cationic lipid of formula A, a neutral lipid, a sterol and a PEG or PEG-modified lipid disclosed in US 20120101148 to Akinc et al., the contents of which are incorporated herein by reference in their entirety.

[0167] In one embodiment, the LNP formulation may be formulated by the methods described in International Publication Nos. WO2011127255 or WO2008103276, each of which are herein incorporated by reference in their entirety. As a non-limiting example, the saRNA of the present invention may be encapsulated in any of the lipid nanoparticle (LNP) formulations described in WO2011127255 and/or WO2008103276; the contents of each of which are herein incorporated by reference in their entirety.

[0168] In one embodiment, the LNP formulations described herein may comprise a polycationic composition. As a non-limiting example, the polycationic composition may be selected from formula 1-60 of US Patent Publication No. US20050222064; the contents of which is herein incorporated by reference in its entirety. In another embodiment, the LNP formulations comprising a polycationic composition may be used for the delivery of the saRNA described herein in vivo and/or in vitro.

[0169] In one embodiment, the LNP formulations described herein may additionally comprise a permeability enhancer molecule. Non-limiting permeability enhancer molecules are described in US Patent Publication No. US20050222064; the contents of which is herein incorporated by reference in its entirety.

[0170] In one embodiment, the pharmaceutical compositions may be formulated in liposomes such as, but not limited to, DiLa2 liposomes (Marina Biotech, Bothell, Wash.), SMARTICLES®/NOV340 (Marina Biotech, Bothell, Wash.), neutral DOPC (1,2-dioleoyl-sn-glycero-3-phosphocholine) based liposomes (e.g., siRNA delivery for ovarian cancer (Landen et al. Cancer Biology & Therapy 2006 5(12)1708-1713); the contents of which is herein incorporated by reference in its entirety) and hyaluronan-coated liposomes (Quiet Therapeutics, Israel).

[0171] In some embodiments, the pharmaceutical compositions may be formulated with any amphoteric liposome disclosed in WO 2008/043575 to Panzner and U.S. Pat. No. 8,580,297 to Essler et al. (Marina Biotech), the contents of which are incorporated herein by reference in their entirety. The amphoteric liposome may comprise a mixture of lipids including a cationic amphiphile, an anionic amphiphile and optional one or more neutral amphiphiles. The amphoteric liposome may comprise amphoteric compounds based on amphiphilic molecules, the head groups of which being substituted with one or more amphoteric groups. In some embodiments, the pharmaceutical compositions may be formulated with an amphoteric lipid comprising one or more amphoteric groups having an isoelectric point between 4 and 9, as disclosed in US 20140227345 to Essler et al. (Marina Biotech), the contents of which are incorporated herein by reference in their entirety.

[0172] In some embodiments, the pharmaceutical composition may be formulated with liposomes comprising a sterol derivative as disclosed in U.S. Pat. No. 7,312,206 to Panzner et al. (Novosom), the contents of which are incorporated herein by reference in their entirety. In some embodiments, the pharmaceutical composition may be formulated with amphoteric liposomes comprising at least one amphipathic cationic lipid, at least one amphipathic anionic lipid, and at least one neutral lipid, or liposomes comprise at least one amphipathic lipid with both a positive and a negative charge, and at least one neutral lipid, wherein the liposomes are stable at pH 4.2 and pH 7.5, as disclosed in U.S. Pat. No. 7,780,983 to Panzner et al. (Novosom), the contents of which are incorporated herein by reference in their entirety. In some embodiments, the pharmaceutical composition may be formulated with liposomes comprising a serum-stable mixture of lipids taught in US 20110076322 to Panzner et al, the contents of which are incorporated herein by reference in their entirety, capable of encapsulating the saRNA of the present invention. The lipid mixture comprises phosphatidylcholine and phosphatidylethanolamine in a ratio in the range of about 0.5 to about 8. The lipid mixture may also include pH sensitive anionic and cationic amphiphiles, such that the mixture is amphoteric, being negatively charged or neutral at pH 7.4 and positively charged at pH 4. The drug/lipid ratio may be adjusted to target the liposomes to particular organs or other sites in the body. In some embodiments, liposomes loaded with the saRNA of the present invention as cargo, are prepared by the method disclosed in US 20120021042 to Panzner et al., the contents of which are incorporated herein by reference in their entirety. The method comprises steps of admixing an aqueous solution of a polyanionic active agent and an alcoholic solution of one or more amphiphiles and buffering said admixture to an acidic pH, wherein the one or more amphiphiles are susceptible of forming amphoteric liposomes at the acidic pH, thereby to form amphoteric liposomes in suspension encapsulating the active agent.

[0173] The nanoparticle formulations may be a carbohydrate nanoparticle comprising a carbohydrate carrier and a nucleic acid molecule (e.g., saRNA). As a non-limiting example, the carbohydrate carrier may include, but is not limited to, an anhydride-modified phytoglycogen or glycogen-type material, phtoglycogen octenyl succinate, phytoglycogen beta-dextrin, anhydride-modified phytoglycogen beta-dextrin. (See e.g., International Publication No. WO2012109121; the contents of which is herein incorporated by reference in its entirety).

[0174] Lipid nanoparticle formulations may be improved by replacing the cationic lipid with a biodegradable cationic lipid which is known as a rapidly eliminated lipid nanoparticle (reLNP). Ionizable cationic lipids, such as, but not limited to, DLinDMA, DLin-KC2-DMA, and DLin-MC3-DMA, have been shown to accumulate in plasma and tissues over time and may be a potential source of toxicity. The rapid metabolism of the rapidly eliminated lipids can improve the tolerability and therapeutic index of the lipid nanoparticles by an order of magnitude from a 1 mg/kg dose to a 10 mg/kg dose in rat. Inclusion of an enzymatically degraded ester linkage can improve the degradation and metabolism profile of the cationic component, while still maintaining the activity of the reLNP formulation. The ester linkage can be internally located within the lipid chain or it may be terminally located at the terminal end of the lipid chain. The internal ester linkage may replace any carbon in the lipid chain.

[0175] In one embodiment, the saRNA may be formulated as a lipoplex, such as, without limitation, the ATUPLEX™ system, the DACC system, the DBTC system and other siRNA-lipoplex technology from Silence Therapeutics (London, United Kingdom), STEMFECT™ from STEMGENT® (Cambridge, Mass.), and polyethylenimine (PEI) or protamine-based targeted and non-targeted delivery of nucleic acids (Aleku et al. Cancer Res. 2008 68:9788-9798; Strumberg et al. Int J Clin Pharmacol Ther 2012 50:76-78; Santel et al., Gene Ther 2006 13:1222-1234; Santel et al., Gene Ther 2006 13:1360-1370; Gutbier et al., Pulm Pharmacol. Ther. 2010 23:334-344; Kaufmann et al. Microvasc Res 2010 80:286-293Weide et al. J Immunother. 2009 32:498-507; Weide et al. J Immunother. 2008 31:180-188; Pascolo Expert Opin. Biol. Ther. 4:1285-1294; Fotin-Mleczek et al., 2011 J. Immunother. 34:1-15; Song et al., Nature Biotechnol. 2005, 23:709-717; Peer et al., Proc Natl Acad Sci USA. 2007 6; 104:4095-4100; deFougerolles Hum Gene Ther. 2008 19:125-132; the contents of each of which are incorporated herein by reference in its entirety).

[0176] In one embodiment such formulations may also be constructed or compositions altered such that they passively or actively are directed to different cell types in vivo, including but not limited to hepatocytes, immune cells, tumor cells, endothelial cells, antigen presenting cells, and leukocytes (Akinc et al. Mol Ther. 2010 18:1357-1364; Song et al., Nat Biotechnol. 2005 23:709-717; Judge et al., J Clin Invest. 2009 119:661-673; Kaufmann et al., Microvasc Res 2010 80:286-293; Santel et al., Gene Ther 2006 13:1222-1234; Santel et al., Gene Ther 2006 13:1360-1370; Gutbier et al., Pulm Pharmacol. Ther. 2010 23:334-344; Basha et al., Mol. Ther. 2011 19:2186-2200; Fenske and Cullis, Expert Opin Drug Deliv. 2008 5:25-44; Peer et al., Science. 2008 319:627-630; Peer and Lieberman, Gene Ther. 2011 18:1127-1133; the contents of each of which are incorporated herein by reference in its entirety). One example of passive targeting of formulations to liver cells includes the DLin-DMA, DLin-KC2-DMA and DLin-MC3-DMA-based lipid nanoparticle formulations which have been shown to bind to apolipoprotein E and promote binding and uptake of these formulations into hepatocytes in vivo (Akinc et al. Mol Ther. 2010 18:1357-1364; the contents of which is herein incorporated by reference in its entirety). Formulations can also be selectively targeted through expression of different ligands on their surface as exemplified by, but not limited by, folate, transferrin, N-acetylgalactosamine (GalNAc), and antibody targeted approaches (Kolhatkar et al., Curr Drug Discov Technol. 2011 8:197-206; Musacchio and Torchilin, Front Biosci. 2011 16:1388-1412; Yu et al., Mol Membr Biol. 2010 27:286-298; Patil et al., Crit Rev Ther Drug Carrier Syst. 2008 25:1-61; Benoit et al., Biomacromolecules. 2011 12:2708-2714; Zhao et al., Expert Opin Drug Deliv. 2008 5:309-319; Akinc et al., Mol Ther. 2010 18:1357-1364; Srinivasan et al., Methods Mol Biol. 2012 820:105-116; Ben-Arie et al., Methods Mol Biol. 2012 757:497-507; Peer 2010 J Control Release. 20:63-68; Peer et al., Proc Natl Acad Sci USA. 2007 104:4095-4100; Kim et al., Methods Mol Biol. 2011 721:339-353; Subramanya et al., Mol Ther. 2010 18:2028-2037; Song et al., Nat Biotechnol. 2005 23:709-717; Peer et al., Science. 2008 319:627-630; Peer and Lieberman, Gene Ther. 2011 18:1127-1133; the contents of each of which are incorporated herein by reference in its entirety).

[0177] In one embodiment, the saRNA is formulated as a solid lipid nanoparticle. A solid lipid nanoparticle (SLN) may be spherical with an average diameter between 10 to 1000 nm. SLN possess a solid lipid core matrix that can solubilize lipophilic molecules and may be stabilized with surfactants and/or emulsifiers. In a further embodiment, the lipid nanoparticle may be a self-assembly lipid-polymer nanoparticle (see Zhang et al., ACS Nano, 2008, 2 (8), pp 1696-1702; the contents of which are herein incorporated by reference in its entirety).

[0178] In one embodiment, the saRNA of the present invention can be formulated for controlled release and/or targeted delivery. As used herein, “controlled release” refers to a pharmaceutical composition or compound release profile that conforms to a particular pattern of release to effect a therapeutic outcome. In one embodiment, the saRNA may be encapsulated into a delivery agent described herein and/or known in the art for controlled release and/or targeted delivery. As used herein, the term “encapsulate” means to enclose, surround or encase. As it relates to the formulation of the compounds of the invention, encapsulation may be substantial, complete or partial. The term “substantially encapsulated” means that at least greater than 50, 60, 70, 80, 85, 90, 95, 96, 97, 98, 99, 99.9, 99.9 or greater than 99.999% of the pharmaceutical composition or compound of the invention may be enclosed, surrounded or encased within the delivery agent. “Partially encapsulated” means that less than 10, 10, 20, 30, 40 50 or less of the pharmaceutical composition or compound of the invention may be enclosed, surrounded or encased within the delivery agent. Advantageously, encapsulation may be determined by measuring the escape or the activity of the pharmaceutical composition or compound of the invention using fluorescence and/or electron micrograph. For example, at least 1, 5, 10, 20, 30, 40, 50, 60, 70, 80, 85, 90, 95, 96, 97, 98, 99, 99.9, 99.99 or greater than 99.99% of the pharmaceutical composition or compound of the invention are encapsulated in the delivery agent.

[0179] In another embodiment, the saRNA may be encapsulated into a lipid nanoparticle or a rapidly eliminated lipid nanoparticle and the lipid nanoparticles or a rapidly eliminated lipid nanoparticle may then be encapsulated into a polymer, hydrogel and/or surgical sealant described herein and/or known in the art. As a non-limiting example, the polymer, hydrogel or surgical sealant may be PLGA, ethylene vinyl acetate (EVAc), poloxamer, GELSITE® (Nanotherapeutics, Inc. Alachua, Fla.), HYLENEX® (Halozyme Therapeutics, San Diego Calif.), surgical sealants such as fibrinogen polymers (Ethicon Inc. Cornelia, Ga.), TISSELL® (Baxter International, Inc., Deerfield, Ill.), PEG-based sealants, and COSEAL® (Baxter International, Inc., Deerfield, Ill.).

[0180] In another embodiment, the lipid nanoparticle may be encapsulated into any polymer known in the art which may form a gel when injected into a subject. As another non-limiting example, the lipid nanoparticle may be encapsulated into a polymer matrix which may be biodegradable.

[0181] In one embodiment, the saRNA formulation for controlled release and/or targeted delivery may also include at least one controlled release coating. Controlled release coatings include, but are not limited to, OPADRY®, polyvinylpyrrolidone/vinyl acetate copolymer, polyvinylpyrrolidone, hydroxypropyl methylcellulose, hydroxypropyl cellulose, hydroxyethyl cellulose, EUDRAGIT RL®, EUDRAGIT RS® and cellulose derivatives such as ethylcellulose aqueous dispersions (AQUACOAT® and SURELEASE®).

[0182] In one embodiment, the controlled release and/or targeted delivery formulation may comprise at least one degradable polyester which may contain polycationic side chains. Degradeable polyesters include, but are not limited to, poly(serine ester), poly(L-lactide-co-L-lysine), poly(4-hydroxy-L-proline ester), and combinations thereof. In another embodiment, the degradable polyesters may include a PEG conjugation to form a PEGylated polymer.

[0183] In one embodiment, the saRNA of the present invention may be formulated with a targeting lipid with a targeting moiety such as the targeting moieties disclosed in US20130202652 to Manoharan et al., the contents of which are incorporated herein by reference in their entirety. As a non-limiting example, the targeting moiety of formula I of US 20130202652 to Manoharan et al. may selected in order to favor the lipid being localized with a desired organ, tissue, cell, cell type or subtype, or organelle. Non-limiting targeting moieties that are contemplated in the present invention include transferrin, anisamide, an RGD peptide, prostate specific membrane antigen (PSMA), fucose, an antibody, or an aptamer.

[0184] In one embodiment, the saRNA of the present invention may be encapsulated in a therapeutic nanoparticle. Therapeutic nanoparticles may be formulated by methods described herein and known in the art such as, but not limited to, International Pub Nos. WO2010005740, WO2010030763, WO2010005721, WO2010005723, WO2012054923, US Pub. Nos. US20110262491, US20100104645, US20100087337, US20100068285, US20110274759, US20100068286 and US20120288541 and U.S. Pat. Nos. 8,206,747, 8,293,276, 8,318,208 and 8,318,211; the contents of each of which are herein incorporated by reference in their entirety. In another embodiment, therapeutic polymer nanoparticles may be identified by the methods described in US Pub No. US20120140790, the contents of which are herein incorporated by reference in its entirety.

[0185] In one embodiment, the therapeutic nanoparticle may be formulated for sustained release. As used herein, “sustained release” refers to a pharmaceutical composition or compound that conforms to a release rate over a specific period of time. The period of time may include, but is not limited to, hours, days, weeks, months and years. As a non-limiting example, the sustained release nanoparticle may comprise a polymer and a therapeutic agent such as, but not limited to, the saRNA of the present invention (see International Pub No. 2010075072 and US Pub No. US20100216804, US20110217377 and US20120201859, the contents of each of which are herein incorporated by reference in their entirety).

[0186] In one embodiment, the therapeutic nanoparticles may be formulated to be target specific. As a non-limiting example, the therapeutic nanoparticles may include a corticosteroid (see International Pub. No. WO2011084518; the contents of which are herein incorporated by reference in its entirety). In one embodiment, the therapeutic nanoparticles may be formulated to be cancer specific. As a non-limiting example, the therapeutic nanoparticles may be formulated in nanoparticles described in International Pub No. WO2008121949, WO2010005726, WO2010005725, WO2011084521 and US Pub No. US20100069426, US20120004293 and US20100104655, the contents of each of which are herein incorporated by reference in their entirety.

[0187] In one embodiment, the nanoparticles of the present invention may comprise a polymeric matrix. As a non-limiting example, the nanoparticle may comprise two or more polymers such as, but not limited to, polyethylenes, polycarbonates, polyanhydrides, polyhydroxyacids, polypropylfumerates, polycaprolactones, polyamides, polyacetals, polyethers, polyesters, poly(orthoesters), polycyanoacrylates, polyvinyl alcohols, polyurethanes, polyphosphazenes, polyacrylates, polymethacrylates, polycyanoacrylates, polyureas, polystyrenes, polyamines, polylysine, poly(ethylene imine), poly(serine ester), poly(L-lactide-co-L-lysine), poly(4-hydroxy-L-proline ester) or combinations thereof.

[0188] In one embodiment, the therapeutic nanoparticle comprises a diblock copolymer. In one embodiment, the diblock copolymer may include PEG in combination with a polymer such as, but not limited to, polyethylenes, polycarbonates, polyanhydrides, polyhydroxyacids, polypropylfumerates, polycaprolactones, polyamides, polyacetals, polyethers, polyesters, poly(orthoesters), polycyanoacrylates, polyvinyl alcohols, polyurethanes, polyphosphazenes, polyacrylates, polymethacrylates, polycyanoacrylates, polyureas, polystyrenes, polyamines, polylysine, poly(ethylene imine), poly(serine ester), poly(L-lactide-co-L-lysine), poly(4-hydroxy-L-proline ester) or combinations thereof.

[0189] As a non-limiting example the therapeutic nanoparticle comprises a PLGA-PEG block copolymer (see US Pub. No. US20120004293 and U.S. Pat. No. 8,236,330, each of which is herein incorporated by reference in their entirety). In another non-limiting example, the therapeutic nanoparticle is a stealth nanoparticle comprising a diblock copolymer of PEG and PLA or PEG and PLGA (see U.S. Pat. No. 8,246,968 and International Publication No. WO2012166923, the contents of each of which is herein incorporated by reference in its entirety).

[0190] In one embodiment, the therapeutic nanoparticle may comprise a multiblock copolymer such as, but not limited to the multiblock copolymers described in U.S. Pat. Nos. 8,263,665 and 8,287,910; the contents of each of which are herein incorporated by reference in its entirety.

[0191] In one embodiment, the block copolymers described herein may be included in a polyion complex comprising a non-polymeric micelle and the block copolymer. (See e.g., U.S. Pub. No. 20120076836; the contents of which are herein incorporated by reference in its entirety).

[0192] In one embodiment, the therapeutic nanoparticle may comprise at least one acrylic polymer. Acrylic polymers include but are not limited to, acrylic acid, methacrylic acid, acrylic acid and methacrylic acid copolymers, methyl methacrylate copolymers, ethoxyethyl methacrylates, cyanoethyl methacrylate, amino alkyl methacrylate copolymer, poly(acrylic acid), poly(methacrylic acid), polycyanoacrylates and combinations thereof.

[0193] In one embodiment, the therapeutic nanoparticles may comprise at least one amine-containing polymer such as, but not limited to polylysine, polyethylene imine, poly(amidoamine) dendrimers, poly(beta-amino esters) (See e.g., U.S. Pat. No. 8,287,849; the contents of which are herein incorporated by reference in its entirety) and combinations thereof.

[0194] In one embodiment, the therapeutic nanoparticles may comprise at least one degradable polyester which may contain polycationic side chains. Degradable polyesters include, but are not limited to, poly(serine ester), poly(L-lactide-co-L-lysine), poly(4-hydroxy-L-proline ester), and combinations thereof. In another embodiment, the degradable polyesters may include a PEG conjugation to form a PEGylated polymer.

[0195] In another embodiment, the therapeutic nanoparticle may include a conjugation of at least one targeting ligand. The targeting ligand may be any ligand known in the art such as, but not limited to, a monoclonal antibody. (Kirpotin et al, Cancer Res. 2006 66:6732-6740; the contents of which are herein incorporated by reference in its entirety).

[0196] In one embodiment, the therapeutic nanoparticle may be formulated in an aqueous solution which may be used to target cancer (see International Pub No. WO2011084513 and US Pub No. US20110294717, the contents of each of which is herein incorporated by reference in their entirety).

[0197] In one embodiment, the saRNA may be encapsulated in, linked to and/or associated with synthetic nanocarriers. Synthetic nanocarriers include, but are not limited to, those described in International Pub. Nos. WO2010005740, WO2010030763, WO201213501, WO2012149252, WO2012149255, WO2012149259, WO2012149265, WO2012149268, WO2012149282, WO2012149301, WO2012149393, WO2012149405, WO2012149411, WO2012149454 and WO2013019669, and US Pub. Nos. US20110262491, US20100104645, US20100087337 and US20120244222, the contents of each of which are herein incorporated by reference in their entirety. The synthetic nanocarriers may be formulated using methods known in the art and/or described herein. As a non-limiting example, the synthetic nanocarriers may be formulated by the methods described in International Pub Nos. WO2010005740, WO2010030763 and WO201213501and US Pub. Nos. US20110262491, US20100104645, US20100087337 and US2012024422, the contents of each of which are herein incorporated by reference in their entirety. In another embodiment, the synthetic nanocarrier formulations may be lyophilized by methods described in International Pub. No. WO2011072218 and U.S. Pat. No. 8,211,473; the contents of each of which are herein incorporated by reference in their entirety.

[0198] In one embodiment, the synthetic nanocarriers may contain reactive groups to release the saRNA described herein (see International Pub. No. WO20120952552 and US Pub No. US20120171229, the contents of each of which are herein incorporated by reference in their entirety).

[0199] In one embodiment, the synthetic nanocarriers may be formulated for targeted release. In one embodiment, the synthetic nanocarrier may be formulated to release the saRNA at a specified pH and/or after a desired time interval. As a non-limiting example, the synthetic nanoparticle may be formulated to release the saRNA after 24 hours and/or at a pH of 4.5 (see International Pub. Nos. WO2010138193 and WO2010138194 and US Pub Nos. US20110020388 and US20110027217, the contents of each of which is herein incorporated by reference in their entireties).

[0200] In one embodiment, the synthetic nanocarriers may be formulated for controlled and/or sustained release of the saRNA described herein. As a non-limiting example, the synthetic nanocarriers for sustained release may be formulated by methods known in the art, described herein and/or as described in International Pub No. WO2010138192 and US Pub No. 20100303850, the contents each of which is herein incorporated by reference in their entirety.

[0201] In one embodiment, the nanoparticle may be optimized for oral administration. The nanoparticle may comprise at least one cationic biopolymer such as, but not limited to, chitosan or a derivative thereof. As a non-limiting example, the nanoparticle may be formulated by the methods described in U.S. Pub. No. 20120282343; the contents of which are herein incorporated by reference in its entirety.

[0202] In one embodiment, the saRNA of the present invention may be formulated in a modular composition such as described in U.S. Pat. No. 8,575,123 to Manoharan et al., the contents of which are herein incorporated by reference in their entirety. As a non-limiting example, the modular composition may comprise a nucleic acid, e.g., the saRNA of the present invention, at least one endosomolytic component, and at least one targeting ligand. The modular composition may have a formula such as any formula described in U.S. Pat. No. 8,575,123 to Manoharan et al., the contents of which are herein incorporated by reference in their entirety.

[0203] In one embodiment, the saRNA of the present invention may be encapsulated in the lipid formulation to form a stable nucleic acid-lipid particle (SNALP) such as described in U.S. Pat. No. 8,546,554 to de Fougerolles et al., the contents of which are incorporated here by reference in their entirety. The lipid may be cationic or non-cationic. In one non-limiting example, the lipid to nucleic acid ratio (mass/mass ratio) (e.g., lipid to saRNA ratio) will be in the range of from about 1:1 to about 50:1, from about 1:1 to about 25:1, from about 3:1 to about 15:1, from about 4:1 to about 10:1, from about 5: out 9:toabout 9:1, bout 6:1aboutbout 9:1, or 5:1, 6:1, 7:1, 8:1, 9:1, 10:1, or 11:1. In another example, the SNALP includes 40% 2,2-Dilinoleyl-4-dimethylaminoethyl-[1,3]-dioxolane (Lipid A), 10% dioleoylphosphatidylcholine (DSPC), 40% cholesterol, 10% polyethyleneglycol (PEG)-C-DOMG (mole percent) with a particle size of 63.0±20 nm and a 0.027 nucleic acid/lipid ratio. In another embodiment, the saRNA of the present invention may be formulated with a nucleic acid-lipid particle comprising an endosomal membrane destabilizer as disclosed in U.S. Pat. No. 7,189,705 to Lam et al., the contents of which are incorporated herein by reference in their entirety. As a non-limiting example, the endosomal membrane destabilizer may be a Ca²⁺ ion.

[0204] In one embodiment, the saRNA of the present invention may be formulated with formulated lipid particles (FLiPs) disclosed in U.S. Pat. No. 8,148,344 to Akinc et al., the contents of which are herein incorporated by reference in their entirety. Akinc et al. teach that FLiPs may comprise at least one of a single or double-stranded oligonucleotide, where the oligonucleotide has been conjugated to a lipophile and at least one of an emulsion or liposome to which the conjugated oligonucleotide has been aggregated, admixed or associated. These particles have surprisingly been shown to effectively deliver oligonucleotides to heart, lung and muscle disclosed in U.S. Pat. No. 8,148,344 to Akinc et al., the contents of which are herein incorporated by reference in their entirety.

[0205] In one embodiment, the saRNA of the present invention may be delivered to a cell using a composition comprising an expression vector in a lipid formulation as described in U.S. Pat. No. 6,086,913 to Tam et al., the contents of which are incorporated herein by reference in their entirety. The composition disclosed by Tam is serum-stable and comprises an expression vector comprising first and second inverted repeated sequences from an adeno associated virus (AAV), a rep gene from AAV, and a nucleic acid fragment. The expression vector in Tam is complexed with lipids.

[0206] In one embodiment, the saRNA of the present invention may be formulated with a lipid formulation disclosed in US 20120270921 to de Fougerolles et al., the contents of which are incorporated herein by reference in their entirety. In one non-limiting example, the lipid formulation may include a cationic lipid having the formula A described in US 20120270921, the contents of which are herein incorporated by reference in its entirety. In another non-limiting example, the compositions of exemplary nucleic acid-lipid particles disclosed in Table A of US 20120270921, the contents of which are incorporated herein by reference in their entirety, may be used with the saRNA of the present invention.

[0207] In one embodiment, the saRNA of the present invention may be fully encapsulated in a lipid particle disclosed in US 20120276207 to Maurer et al., the contents of which are incorporated herein by reference in their entirety. The particles may comprise a lipid composition comprising preformed lipid vesicles, a charged therapeutic agent, and a destabilizing agent to form a mixture of preformed vesicles and therapeutic agent in a destabilizing solvent, wherein the destabilizing solvent is effective to destabilize the membrane of the preformed lipid vesicles without disrupting the vesicles.

[0208] In one embodiment, the saRNA of the present invention may be formulated with a conjugated lipid. In a non-limiting example, the conjugated lipid may have a formula such as described in US 20120264810 to Lin et al., the contents of which are incorporated herein by reference in their entirety. The conjugate lipid may form a lipid particle which further comprises a cationic lipid, a neutral lipid, and a lipid capable of reducing aggregation.

[0209] In one embodiment, the saRNA of the present invention may be formulated in a neutral liposomal formulation such as disclosed in US 20120244207 to Fitzgerald et al., the contents of which are incorporated herein by reference in their entirety. The phrase “neutral liposomal formulation” refers to a liposomal formulation with a near neutral or neutral surface charge at a physiological pH. Physiological pH can be, e.g., about 7.0 to about 7.5, or, e.g., about 7.5, or, e.g., 7.0, 7.1, 7.2, 7.3, 7.4, or 7.5, or, e.g., 7.3, or, e.g., 7.4. An example of a neutral liposomal formulation is an ionizable lipid nanoparticle (iLNP). A neutral liposomal formulation can include an ionizable cationic lipid, e.g., DLin-KC2-DMA.

[0210] In one embodiment, the saRNA of the present invention may be formulated with a charged lipid or an amino lipid. As used herein, the term “charged lipid” is meant to include those lipids having one or two fatty acyl or fatty alkyl chains and a quaternary amino head group. The quaternary amine carries a permanent positive charge. The head group can optionally include an ionizable group, such as a primary, secondary, or tertiary amine that may be protonated at physiological pH. The presence of the quaternary amine can alter the pKa of the ionizable group relative to the pKa of the group in a structurally similar compound that lacks the quaternary amine (e.g., the quaternary amine is replaced by a tertiary amine) In some embodiments, a charged lipid is referred to as an “amino lipid.” In a non-limiting example, the amino lipid may be any amino lipid described in US20110256175 to Hope et al., the contents of which are incorporated herein by reference in their entirety. For example, the amino lipids may have the structure disclosed in Tables 3-7 of Hope, such as structure (II), DLin-K-C2-DMA, DLin-K2-DMA, DLin-K6-DMA, etc.. The resulting pharmaceutical preparations may be lyophilized according to Hope. In another non-limiting example, the amino lipids may be any amino lipid described in US 20110117125 to Hope et al., the contents of which are incorporated herein by reference in their entirety, such as a lipid of structure (I), DLin-K-DMA, DLin-C-DAP, DLin-DAC, DLin-MA, DLin-S-DMA, etc. In another non-limiting example, the amino lipid may have the structure (I), (II), (III), or (IV), or 4-(R)-DUn-K-DMA (VI), 4-(S)-DUn-K-DMA (V) as described in WO2009132131 to Manoharan et al., the contents of which are incorporated herein by reference in their entirety. In another non-limiting example, the charged lipid used in any of the formulations described herein may be any charged lipid described in EP2509636 to Manoharan et al., the contents of which are incorporated herein by reference in their entirety.

[0211] In one embodiment, the saRNA of the present invention may be formulated with an association complex containing lipids, liposomes, or lipoplexes. In a non-limiting example, the association complex comprises one or more compounds each having a structure defined by formula (I), a PEG-lipid having a structure defined by formula (XV), a steroid and a nucleic acid disclosed in U.S. Pat. No. 8,034,376 to Manoharan et al., the contents of which are incorporated herein by reference in their entirety. The saRNA may be formulated with any association complex described in U.S. Pat. No. 8,034,376, the contents of which are herein incorporated by reference in its entirety.

[0212] In one embodiment, the saRNA of the present invention may be formulated with reverse head group lipids. As a non-limiting example, the saRNA may be formulated with a zwitterionic lipid comprising a headgroup wherein the positive charge is located near the acyl chain region and the negative charge is located at the distal end of the head group, such as a lipid having structure (A) or structure (I) described in WO2011056682 to Leung et al., the contents of which are incorporated herein by reference in their entirety.

[0213] In one embodiment, the saRNA of the present invention may be formulated in a lipid bilayer carrier. As a non-limiting example, the saRNA may be combined with a lipid-detergent mixture comprising a lipid mixture of an aggregation-preventing agent in an amount of about 5 mol % to about 20 mol %, a cationic lipid in an amount of about 0.5 mol % to about 50 mol %, and a fusogenic lipid and a detergent, to provide a nucleic acid-lipid-detergent mixture; and then dialyzing the nucleic acid-lipid-detergent mixture against a buffered salt solution to remove the detergent and to encapsulate the nucleic acid in a lipid bilayer carrier and provide a lipid bilayer-nucleic acid composition, wherein the buffered salt solution has an ionic strength sufficient to encapsulate of from about 40% to about 80% of the nucleic acid, described in WO1999018933 to Cullis et al., the contents of which are incorporated herein by reference in their entirety.

[0214] In one embodiment, the saRNA of the present invention may be formulated in a nucleic acid-lipid particle capable of selectively targeting the saRNA to a heart, liver, or tumor tissue site. For example, the nucleic acid-lipid particle may comprise (a) a nucleic acid; (b) 1.0 mole % to 45 mole % of a cationic lipid; (c) 0.0 mole % to 90 mole % of another lipid; (d) 1.0 mole % to 10 mole % of a bilayer stabilizing component; (e) 0.0 mole % to 60 mole % cholesterol; and (f) 0.0 mole % to 10 mole % of cationic polymer lipid as described in EP1328254 to Cullis et al., the contents of which are incorporated herein by reference in their entirety. Cullis teaches that varying the amount of each of the cationic lipid, bilayer stabilizing component, another lipid, cholesterol, and cationic polymer lipid can impart tissue selectivity for heart, liver, or tumor tissue site, thereby identifying a nucleic acid-lipid particle capable of selectively targeting a nucleic acid to the heart, liver, or tumor tissue site.

### Polymers, Biodegradable Nanoparticles, and Core-Shell Nanoparticles

[0215] The saRNA of the invention can be formulated using natural and/or synthetic polymers. Non-limiting examples of polymers which may be used for delivery include, but are not limited to, DYNAMIC POLYCONJUGATE® (Arrowhead Research Corp., Pasadena, Calif.) formulations from MIRUS® Bio (Madison, Wis.) and Roche Madison (Madison, Wis.), PHASERX™ polymer formulations such as, without limitation, SMARTT POLYMER TECHNOLOGY™ (PHASERX®, Seattle, Wash.), DMRI/DOPE, poloxamer, VAXFECTIN® adjuvant from Vical (San Diego, Calif.), chitosan, cyclodextrin from Calando Pharmaceuticals (Pasadena, Calif.), dendrimers and poly(lactic-co-glycolic acid) (PLGA) polymers. RONDEL™ (RNAi/Oligonucleotide Nanoparticle Delivery) polymers (Arrowhead Research Corporation, Pasadena, Calif.) and pH responsive co-block polymers such as, but not limited to, PHASERX® (Seattle, Wash.).

[0216] A non-limiting example of chitosan formulation includes a core of positively charged chitosan and an outer portion of negatively charged substrate (U.S. Pub. No. 20120258176; herein incorporated by reference in its entirety). Chitosan includes, but is not limited to N-trimethyl chitosan, mono-N-carboxymethyl chitosan (MCC), N-palmitoyl chitosan (NPCS), EDTA-chitosan, low molecular weight chitosan, chitosan derivatives, or combinations thereof.

[0217] In one embodiment, the polymers used in the present invention have undergone processing to reduce and/or inhibit the attachment of unwanted substances such as, but not limited to, bacteria, to the surface of the polymer. The polymer may be processed by methods known and/or described in the art and/or described in International Pub. No. WO2012150467, herein incorporated by reference in its entirety.

[0218] A non-limiting example of PLGA formulations include, but are not limited to, PLGA injectable depots (e.g., ELIGARD® which is formed by dissolving PLGA in 66% N-methyl-2-pyrrolidone (NMP) and the remainder being aqueous solvent and leuprolide. Once injected, the PLGA and leuprolide peptide precipitates into the subcutaneous space).

[0219] Many of these polymer approaches have demonstrated efficacy in delivering oligonucleotides in vivo into the cell cytoplasm (reviewed in de Fougerolles Hum Gene Ther. 2008 19:125-132; herein incorporated by reference in its entirety). Two polymer approaches that have yielded robust in vivo delivery of nucleic acids, in this case with small interfering RNA (siRNA), are dynamic polyconjugates and cyclodextrin-based nanoparticles. The first of these delivery approaches uses dynamic polyconjugates and has been shown in vivo in mice to effectively deliver siRNA and silence endogenous target mRNA in hepatocytes (Rozema et al., Proc Natl Acad Sci USA. 2007 104:12982-12887; herein incorporated by reference in its entirety). This particular approach is a multicomponent polymer system whose key features include a membrane-active polymer to which nucleic acid, in this case siRNA, is covalently coupled via a disulfide bond and where both PEG (for charge masking) and N-acetylgalactosamine (for hepatocyte targeting) groups are linked via pH-sensitive bonds (Rozema et al., Proc Natl Acad Sci USA. 2007 104:12982-12887; herein incorporated by reference in its entirety). On binding to the hepatocyte and entry into the endosome, the polymer complex disassembles in the low-pH environment, with the polymer exposing its positive charge, leading to endosomal escape and cytoplasmic release of the siRNA from the polymer. Through replacement of the N-acetylgalactosamine group with a mannose group, it was shown one could alter targeting from asialoglycoprotein receptor-expressing hepatocytes to sinusoidal endothelium and Kupffer cells. Another polymer approach involves using transferrin-targeted cyclodextrin-containing polycation nanoparticles. These nanoparticles have demonstrated targeted silencing of the EWS-FLI1 gene product in transferrin receptor-expressing Ewing's sarcoma tumor cells (Hu-Lieskovan et al., Cancer Res.2005 65: 8984-8982; herein incorporated by reference in its entirety) and siRNA formulated in these nanoparticles was well tolerated in non-human primates (Heidel et al., Proc Natl Acad Sci USA 2007 104:5715-21; herein incorporated by reference in its entirety). Both of these delivery strategies incorporate rational approaches using both targeted delivery and endosomal escape mechanisms.

[0220] The polymer formulation can permit the sustained or delayed release of saRNA (e.g., following intramuscular or subcutaneous injection). The altered release profile for the saRNA can result in, for example, translation of an encoded protein over an extended period of time. Biodegradable polymers have been previously used to protect nucleic acids from degradation and been shown to result in sustained release of payloads in vivo (Rozema et al., Proc Natl Acad Sci USA. 2007 104:12982-12887; Sullivan et al., Expert Opin Drug Deliv. 2010 7:1433-1446; Convertine et al., Biomacromolecules. 2010 Oct. 1; Chu et al., Acc Chem Res. 2012 Jan. 13; Manganiello et al., Biomaterials. 2012 33:2301-2309; Benoit et al., Biomacromolecules. 2011 12:2708-2714; Singha et al., Nucleic Acid Ther. 2011 2:133-147; de Fougerolles Hum Gene Ther. 2008 19:125-132; Schaffert and Wagner, Gene Ther. 2008 16:1131-1138; Chaturvedi et al., Expert Opin Drug Deliv. 2011 8:1455-1468; Davis, Mol Pharm. 2009 6:659-668; Davis, Nature 2010 464:1067-1070; each of which is herein incorporated by reference in its entirety).

[0221] In one embodiment, the pharmaceutical compositions may be sustained release formulations. In a further embodiment, the sustained release formulations may be for subcutaneous delivery. Sustained release formulations may include, but are not limited to, PLGA microspheres, ethylene vinyl acetate (EVAc), poloxamer, GELSITE® (Nanotherapeutics, Inc. Alachua, Fla.), HYLENEX® (Halozyme Therapeutics, San Diego Calif.), surgical sealants such as fibrinogen polymers (Ethicon Inc. Cornelia, Ga.), TISSELL® (Baxter International, Inc Deerfield, Ill.), PEG-based sealants, and COSEAL® (Baxter International, Inc Deerfield, Ill.).

[0222] As a non-limiting example saRNA may be formulated in PLGA microspheres by preparing the PLGA microspheres with tunable release rates (e.g., days and weeks) and encapsulating the saRNA in the PLGA microspheres while maintaining the integrity of the saRNA during the encapsulation process. EVAc are non-biodegradeable, biocompatible polymers which are used extensively in pre-clinical sustained release implant applications (e.g., extended release products Ocusert a pilocarpine ophthalmic insert for glaucoma or progestasert a sustained release progesterone intrauterine device; transdermal delivery systems Testoderm, Duragesic and Selegiline; catheters). Poloxamer F-407 NF is a hydrophilic, non-ionic surfactant triblock copolymer of polyoxyethylene-polyoxypropylene-polyoxyethylene having a low viscosity at temperatures less than 5° C. and forms a solid gel at temperatures greater than 15° C. PEG-based surgical sealants comprise two synthetic PEG components mixed in a delivery device which can be prepared in one minute, seals in 3 minutes and is reabsorbed within 30 days. GELSITE® and natural polymers are capable of in-situ gelation at the site of administration. They have been shown to interact with protein and peptide therapeutic candidates through ionic interaction to provide a stabilizing effect.

[0223] Polymer formulations can also be selectively targeted through expression of different ligands as exemplified by, but not limited by, folate, transferrin, and N-acetylgalactosamine (GalNAc) (Benoit et al., Biomacromolecules. 2011 12:2708-2714; Rozema et al., Proc Natl Acad Sci USA. 2007 104:12982-12887; Davis, Mol Pharm. 2009 6:659-668; Davis, Nature 2010 464:1067-1070; each of which is herein incorporated by reference in its entirety).

[0224] The saRNA of the invention may be formulated with or in a polymeric compound. The polymer may include at least one polymer such as, but not limited to, polyethenes, polyethylene glycol (PEG), poly(1-lysineXPLL), PEG grafted to PLL, cationic lipopolymer, biodegradable cationic lipopolymer, polyethyleneimine (PEI), cross-linked branched poly(alkylene imines), a polyamine derivative, a modified poloxamer, a biodegradable polymer, elastic biodegradable polymer, biodegradable block copolymer, biodegradable random copolymer, biodegradable polyester copolymer, biodegradable polyester block copolymer, biodegradable polyester block random copolymer, multiblock copolymers, linear biodegradable copolymer, poly[α-(4-aminobutyl)-L-glycolic acid) (PAGA), biodegradable cross-linked cationic multi-block copolymers, polycarbonates, polyanhydrides, polyhydroxyacids, polypropylfumerates, polycaprolactones, polyamides, polyacetals, polyethers, polyesters, poly(orthoesters), polycyanoacrylates, polyvinyl alcohols, polyurethanes, polyphosphazenes, polyacrylates, polymethacrylates, polycyanoacrylates, polyureas, polystyrenes, polyamines, polylysine, poly(ethylene imine), poly(serine ester), poly(L-lactide-co-L-lysine), poly(4-hydroxy-L-proline ester), acrylic polymers, amine-containing polymers, dextran polymers, dextran polymer derivatives or combinations thereof.

[0225] As a non-limiting example, the saRNA of the invention may be formulated with the polymeric compound of PEG grafted with PLL as described in U.S. Pat. No. 6,177,274; herein incorporated by reference in its entirety. The formulation may be used for transfecting cells in vitro or for in vivo delivery of the saRNA. In another example, the saRNA may be suspended in a solution or medium with a cationic polymer, in a dry pharmaceutical composition or in a solution that is capable of being dried as described in U.S. Pub. Nos. 20090042829 and 20090042825; each of which are herein incorporated by reference in their entireties.

[0226] As another non-limiting example the saRNA of the invention may be formulated with a PLGA-PEG block copolymer (see US Pub. No. US20120004293 and U.S. Pat. No. 8,236,330, herein incorporated by reference in their entireties) or PLGA-PEG-PLGA block copolymers (See U.S. Pat. No. 6,004,573, herein incorporated by reference in its entirety). As a non-limiting example, the saRNA of the invention may be formulated with a diblock copolymer of PEG and PLA or PEG and PLGA (see U.S. Pat. No. 8,246,968, herein incorporated by reference in its entirety).

[0227] A polyamine derivative may be used to deliver nucleic acids or to treat and/or prevent a disease or to be included in an implantable or injectable device (U.S. Pub. No. 20100260817 herein incorporated by reference in its entirety). As a non-limiting example, a pharmaceutical composition may include the saRNA and the polyamine derivative described in U.S. Pub. No. 20100260817 (the contents of which are incorporated herein by reference in its entirety. As a non-limiting example the saRNA of the present invention may be delivered using a polyaminde polymer such as, but not limited to, a polymer comprising a 1,3-dipolar addition polymer prepared by combining a carbohydrate diazide monomer with a dilkyne unite comprising oligoamines (U.S. Pat. No. 8,236,280; herein incorporated by reference in its entirety).

[0228] In one embodiment, the saRNA of the present invention may be formulated with at least one polymer and/or derivatives thereof described in International Publication Nos. WO2011115862, WO2012082574 and WO2012068187 and U.S. Pub. No. 20120283427, the contents of each of which are herein incorporated by reference in their entireties. In another embodiment, the saRNA of the present invention may be formulated with a polymer of formula Z as described in WO2011115862, herein incorporated by reference in its entirety. In yet another embodiment, the saRNA may be formulated with a polymer of formula Z, Z′ or Z″ as described in International Pub. Nos. WO2012082574 or WO2012068187 and U.S. Pub. No. 2012028342, the contents of each of which are herein incorporated by reference in their entireties. The polymers formulated with the saRNA of the present invention may be synthesized by the methods described in International Pub. Nos. WO2012082574 or WO2012068187, the contents of each of which are herein incorporated by reference in their entireties.

[0229] The saRNA of the invention may be formulated with at least one acrylic polymer. Acrylic polymers include but are not limited to, acrylic acid, methacrylic acid, acrylic acid and methacrylic acid copolymers, methyl methacrylate copolymers, ethoxyethyl methacrylates, cyanoethyl methacrylate, amino alkyl methacrylate copolymer, poly(acrylic acid), poly(methacrylic acid), polycyanoacrylates and combinations thereof.

[0230] Formulations of saRNA of the invention may include at least one amine-containing polymer such as, but not limited to polylysine, polyethylene imine, poly(amidoamine) dendrimers or combinations thereof.

[0231] For example, the saRNA of the invention may be formulated in a pharmaceutical compound including a poly(alkylene imine), a biodegradable cationic lipopolymer, a biodegradable block copolymer, a biodegradable polymer, or a biodegradable random copolymer, a biodegradable polyester block copolymer, a biodegradable polyester polymer, a biodegradable polyester random copolymer, a linear biodegradable copolymer, PAGA, a biodegradable cross-linked cationic multi-block copolymer or combinations thereof. The biodegradable cationic lipopolymer may be made by methods known in the art and/or described in U.S. Pat. No. 6,696,038, U.S. App. Nos. 20030073619 and 20040142474 each of which is herein incorporated by reference in their entireties. The poly(alkylene imine) may be made using methods known in the art and/or as described in U.S. Pub. No. 20100004315, herein incorporated by reference in its entirety. The biodegradable polymer, biodegradable block copolymer, the biodegradable random copolymer, biodegradable polyester block copolymer, biodegradable polyester polymer, or biodegradable polyester random copolymer may be made using methods known in the art and/or as described in U.S. Pat. Nos. 6,517,869 and 6,267,987, the contents of which are each incorporated herein by reference in their entirety. The linear biodegradable copolymer may be made using methods known in the art and/or as described in U.S. Pat. No. 6,652,886. The PAGA polymer may be made using methods known in the art and/or as described in U.S. Pat. No. 6,217,912 herein incorporated by reference in its entirety. The PAGA polymer may be copolymerized to form a copolymer or block copolymer with polymers such as but not limited to, poly-L-lysine, polyargine, polyornithine, histones, avidin, protamines, polylactides and poly(lactide-co-glycolides). The biodegradable cross-linked cationic multi-block copolymers may be made my methods known in the art and/or as described in U.S. Pat. No. 8,057,821 or U.S. Pub. No. 2012009145 each of which are herein incorporated by reference in their entireties. For example, the multi-block copolymers may be synthesized using linear polyethyleneimine (LPEI) blocks which have distinct patterns as compared to branched polyethyleneimines. Further, the composition or pharmaceutical composition may be made by the methods known in the art, described herein, or as described in U.S. Pub. No. 20100004315 or U.S. Pat. Nos. 6,267,987 and 6,217,912 each of which are herein incorporated by reference in their entireties.

[0232] The saRNA of the invention may be formulated with at least one degradable polyester which may contain polycationic side chains. Degradeable polyesters include, but are not limited to, poly(serine ester), poly(L-lactide-co-L-lysine), poly(4-hydroxy-L-proline ester), and combinations thereof. In another embodiment, the degradable polyesters may include a PEG conjugation to form a PEGylated polymer.

[0233] The saRNA of the invention may be formulated with at least one crosslinkable polyester. Crosslinkable polyesters include those known in the art and described in US Pub. No. 20120269761, herein incorporated by reference in its entirety.

[0234] In one embodiment, the polymers described herein may be conjugated to a lipid-terminating PEG. As a non-limiting example, PLGA may be conjugated to a lipid-terminating PEG forming PLGA-DSPE-PEG. As another non-limiting example, PEG conjugates for use with the present invention are described in International Publication No. WO2008103276, herein incorporated by reference in its entirety. The polymers may be conjugated using a ligand conjugate such as, but not limited to, the conjugates described in U.S. Pat. No. 8,273,363, herein incorporated by reference in its entirety.

[0235] In one embodiment, the saRNA described herein may be conjugated with another compound. Non-limiting examples of conjugates are described in U.S. Pat. Nos. 7,964,578 and 7,833,992, each of which are herein incorporated by reference in their entireties. In another embodiment, saRNA of the present invention may be conjugated with conjugates of formula 1-122 as described in U.S. Pat. Nos. 7,964,578 and 7,833,992, each of which are herein incorporated by reference in their entireties. The saRNA described herein may be conjugated with a metal such as, but not limited to, gold. (See e.g., Giljohann et al. Journ. Amer. Chem. Soc. 2009 131(6): 2072-2073; herein incorporated by reference in its entirety). In another embodiment, the saRNA described herein may be conjugated and/or encapsulated in gold-nanoparticles. (International Pub. No. WO201216269 and U.S. Pub. No. 20120302940; each of which is herein incorporated by reference in its entirety).

[0236] As described in U.S. Pub. No. 20100004313, herein incorporated by reference in its entirety, a gene delivery composition may include a nucleotide sequence and a poloxamer. For example, the saRNA of the present invention may be used in a gene delivery composition with the poloxamer described in U.S. Pub. No. 20100004313.

[0237] In one embodiment, the polymer formulation of the present invention may be stabilized by contacting the polymer formulation, which may include a cationic carrier, with a cationic lipopolymer which may be covalently linked to cholesterol and polyethylene glycol groups. The polymer formulation may be contacted with a cationic lipopolymer using the methods described in U.S. Pub. No. 20090042829 herein incorporated by reference in its entirety.

[0238] The cationic carrier may include, but is not limited to, polyethylenimine, poly(trimethylenimine), poly(tetramethylenimine), polypropylenimine, aminoglycoside-polyamine, dideoxy-diamino-b-cyclodextrin, spermine, spermidine, poly(2-dimethylamino)ethyl methacrylate, poly(lysine), poly(histidine), poly(arginine), cationized gelatin, dendrimers, chitosan, 1,2-Dioleoyl-3-Trimethylammonium-Propane(DOTAP), N-[1-(2,3-dioleoyloxy)propyl]-N,N,N-trimethylammonium chloride (DOTMA), 1-[2-(oleoyloxy)ethyl]-2-oleyl-3-(2-hydroxyethyl)imidazolinium chloride (DOTIM), 2,3-dioleyloxy-N-[2(sperminecarboxamido)ethyl]-N,N-dimethyl-1-propanaminium trifluoroacetate (DOSPA), 3B-[N—(N′,N′-Dimethylaminoethane)-carbamoyl]Cholesterol Hydrochloride (DC-Cholesterol HCl) diheptadecylamidoglycyl spermidine (DOGS), N,N-distearyl-N,N-dimethylammonium bromide (DDAB), N-(1,2-dimyristyloxyprop-3-yl)-N,N-dimethyl-N-hydroxyethyl ammonium bromide (DMRIE), N,N-dioleyl-N,N-dimethylammonium chloride DODAC) and combinations thereof.

[0239] The saRNA of the invention may be formulated in a polyplex of one or more polymers (U.S. Pub. No. 20120237565 and 20120270927; each of which is herein incorporated by reference in its entirety). In one embodiment, the polyplex comprises two or more cationic polymers. The cationic polymer may comprise a poly(ethylene imine) (PEI) such as linear PEI.

[0240] The saRNA of the invention can also be formulated as a nanoparticle using a combination of polymers, lipids, and/or other biodegradable agents, such as, but not limited to, calcium phosphate. Components may be combined in a core-shell, hybrid, and/or layer-by-layer architecture, to allow for fine-tuning of the nanoparticle so to delivery of the saRNA may be enhanced (Wang et al., Nat Mater. 2006 5:791-796; Fuller et al., Biomaterials. 2008 29:1526-1532; DeKoker et al., Adv Drug Deliv Rev. 2011 63:748-761; Endres et al., Biomaterials. 2011 32:7721-7731; Su et al., Mol Pharm. 2011 Jun. 6; 8(3):774-87; herein incorporated by reference in its entirety). As a non-limiting example, the nanoparticle may comprise a plurality of polymers such as, but not limited to hydrophilic-hydrophobic polymers (e.g., PEG-PLGA), hydrophobic polymers (e.g., PEG) and/or hydrophilic polymers (International Pub. No. WO20120225129; herein incorporated by reference in its entirety).

[0241] Biodegradable calcium phosphate nanoparticles in combination with lipids and/or polymers may be used to deliver saRNA in vivo. In one embodiment, a lipid coated calcium phosphate nanoparticle, which may also contain a targeting ligand such as anisamide, may be used to deliver the saRNA of the present invention. For example, to effectively deliver siRNA in a mouse metastatic lung model a lipid coated calcium phosphate nanoparticle was used (Li et al., J Contr Rel. 2010 142: 416-421; Li et al., J Contr Rel. 2012 158:108-114; Yang et al., Mol Ther. 2012 20:609-615; herein incorporated by reference in its entirety). This delivery system combines both a targeted nanoparticle and a component to enhance the endosomal escape, calcium phosphate, in order to improve delivery of the siRNA.

[0242] In one embodiment, calcium phosphate with a PEG-polyanion block copolymer may be used to delivery saRNA (Kazikawa et al., J Contr Rel. 2004 97:345-356; Kazikawa et al., J Contr Rel. 2006 111:368-370; herein incorporated by reference in its entirety).

[0243] In one embodiment, a PEG-charge-conversional polymer (Pitella et al., Biomaterials. 2011 32:3106-3114) may be used to form a nanoparticle to deliver the saRNA of the present invention. The PEG-charge-conversional polymer may improve upon the PEG-polyanion block copolymers by being cleaved into a polycation at acidic pH, thus enhancing endosomal escape.

[0244] The use of core-shell nanoparticles has additionally focused on a high-throughput approach to synthesize cationic cross-linked nanogel cores and various shells (Siegwart et al., Proc Natl Acad Sci USA. 2011 108:12996-13001). The complexation, delivery, and internalization of the polymeric nanoparticles can be precisely controlled by altering the chemical composition in both the core and shell components of the nanoparticle. For example, the core-shell nanoparticles may efficiently deliver saRNA to mouse hepatocytes after they covalently attach cholesterol to the nanoparticle.

[0245] In one embodiment, a hollow lipid core comprising a middle PLGA layer and an outer neutral lipid layer containing PEG may be used to delivery of the saRNA of the present invention. As a non-limiting example, in mice bearing a luciferase-expressing tumor, it was determined that the lipid-polymer-lipid hybrid nanoparticle significantly suppressed luciferase expression, as compared to a conventional lipoplex (Shi et al, Angew Chem Int Ed. 2011 50:7027-7031; herein incorporated by reference in its entirety).

[0246] In one embodiment, the lipid nanoparticles may comprise a core of the saRNA disclosed herein and a polymer shell. The polymer shell may be any of the polymers described herein and are known in the art. In an additional embodiment, the polymer shell may be used to protect the modified nucleic acids in the core.

[0247] Core-shell nanoparticles for use with the saRNA of the present invention may be formed by the methods described in U.S. Pat. No. 8,313,777 herein incorporated by reference in its entirety.

[0248] In one embodiment, the core-shell nanoparticles may comprise a core of the saRNA disclosed herein and a polymer shell. The polymer shell may be any of the polymers described herein and are known in the art. In an additional embodiment, the polymer shell may be used to protect the saRNA in the core. As a non-limiting example, the core-shell nanoparticle may be used to treat an eye disease or disorder (See e.g. US Publication No. 20120321719, herein incorporated by reference in its entirety).

[0249] In one embodiment, the polymer used with the formulations described herein may be a modified polymer (such as, but not limited to, a modified polyacetal) as described in International Publication No. WO2011120053, herein incorporated by reference in its entirety. Delivery

[0250] The present disclosure encompasses the delivery of saRNA for any of therapeutic, prophylactic, pharmaceutical, diagnostic or imaging by any appropriate route taking into consideration likely advances in the sciences of drug delivery. Delivery may be naked or formulated.

[0251] The saRNA of the present invention may be delivered to a cell naked. As used herein in, “naked” refers to delivering saRNA free from agents which promote transfection. For example, the saRNA delivered to the cell may contain no modifications. The naked saRNA may be delivered to the cell using routes of administration known in the art and described herein.

[0252] The saRNA of the present invention may be formulated, using the methods described herein. The formulations may contain saRNA which may be modified and/or unmodified. The formulations may further include, but are not limited to, cell penetration agents, a pharmaceutically acceptable carrier, a delivery agent, a bioerodible or biocompatible polymer, a solvent, and a sustained-release delivery depot. The formulated saRNA may be delivered to the cell using routes of administration known in the art and described herein.

[0253] The compositions may also be formulated for direct delivery to an organ or tissue in any of several ways in the art including, but not limited to, direct soaking or bathing, via a catheter, by gels, powder, ointments, creams, gels, lotions, and/or drops, by using substrates such as fabric or biodegradable materials coated or impregnated with the compositions, and the like. The saRNA of the present invention may also be cloned into a retroviral replicating vector (RRV) and transduced to cells.

### Administration

[0254] The saRNA of the present invention may be administered by any route which results in a therapeutically effective outcome. These include, but are not limited to enteral, gastroenteral, epidural, oral, transdermal, epidural (peridural), intracerebral (into the cerebrum), intracerebroventricular (into the cerebral ventricles), epicutaneous (application onto the skin), intradermal, (into the skin itself), subcutaneous (under the skin), nasal administration (through the nose), intravenous (into a vein), intraarterial (into an artery), intramuscular (into a muscle), intracardiac (into the heart), intraosseous infusion (into the bone marrow), intrathecal (into the spinal canal), intraperitoneal, (infusion or injection into the peritoneum), intravesical infusion, intravitreal, (through the eye), intracavernous injection, (into the base of the penis), intravaginal administration, intrauterine, extra-amniotic administration, transdermal (diffusion through the intact skin for systemic distribution), transmucosal (diffusion through a mucous membrane), insufflation (snorting), sublingual, sublabial, enema, eye drops (onto the conjunctiva), or in ear drops. In specific embodiments, compositions may be administered in a way which allows them cross the blood-brain barrier, vascular barrier, or other epithelial barrier. Routes of administration disclosed in International Publication WO 2013/090648 filed Dec. 14, 2012, the contents of which are incorporated herein by reference in their entirety, may be used to administer the saRNA of the present invention.

### Dosage Forms

[0255] A pharmaceutical composition described herein can be formulated into a dosage form described herein, such as a topical, intranasal, intratracheal, or injectable (e.g., intravenous, intraocular, intravitreal, intramuscular, intracardiac, intraperitoneal, subcutaneous). Liquid dosage forms, injectable preparations, pulmonary forms, and solid dosage forms described in International Publication WO 2013/090648 filed Dec. 14, 2012, the contents of which are incorporated herein by reference in their entirety may be used as dosage forms for the saRNA of the present invention.

### III. Methods of Use

[0256] One aspect of the present invention provides methods of using saRNA of the present invention and pharmaceutical compositions comprising the saRNA and at least one pharmaceutically acceptable carrier. The saRNA of the present invention modulates the expression of its target gene. In one embodiment is provided a method of regulating the expression of a target gene in vitro and/or in vivo comprising administering the saRNA of the present invention. In one embodiment, the expression of the target gene is increased by at least 5, 10, 20, 30, 40%, or at least 45, 50, 55, 60, 65, 70, 75%, or at least 80% in the presence of the saRNA of the present invention compared to the expression of the target gene in the absence of the saRNA of the present invention. In a further embodiment, the expression of the target gene is increased by a factor of at least 2, 3, 4, 5, 6, 7, 8, 9, 10, or by a factor of at least 15, 20, 25, 30, 35, 40, 45, 50, or by a factor of at least 60, 70, 80, 90, 100, in the presence of the saRNA of the present invention compared to the expression of the target gene in the absence of the saRNA of the present invention.

[0257] The target gene may be any gene of the human genome.

[0258] Non-limited examples include apolipoprotein A1 (APOA1), low density lipoprotein (LDLR), dystrophin (DMD), paired box 5 (PAX5), sodium channel voltage-gated type I alpha subunit (SCN1A), iduronidase alpha-L (IDUA), fibronectin type III domain containing 5 (FNDC5), forkhead box A2 (FOXA2), forkhead box P3 (FOXP3), hepatocyte nuclear factor 4, alpha (HNF4A), interferon, gamma (IFNG), interleukin 10 (IL10), interleukin 2 (IL2), LIM homeobox transcription factor I, alpha (LMXIA), meteorin, glial cell differentiation regulator-like (METRNL), nuclear receptor subfamily 4, group A, member 2 (NR4A2), sirtuin I (SIRTI), tyrosine hydroxylase (TH), erythropoietin (EPO), cyclin-dependent kinase inhibitor I B (p27, Kip I) (CDKNIB), MDM2 oncogene, E3 ubiquitin protein ligase (MDM2), interleukin 19 (IL19), chromosome 19 open reading frame 80 (C19orf90), coagulation factor VII (F7), and coagulation factor VIII (F8).

### APOA1 Gene

[0259] As a non-limited example, provided is a method of modulating the expression of APOA1 gene comprising administering saRNA of the present invention, wherein the saRNA targets an antisense RNA transcript of APOA1 gene. These saRNAs are called APOA1-saRNA. In one embodiment, the expression of APOA1 gene is increased by at least 20, 30, 40%, or at least 45, 50, 55, 60, 65, 70, 75%, or at least 80% in the presence of the APOA1-saRNA of the present invention compared to the expression of APOA1 gene in the absence of the APOA1-saRNA of the present invention. In a further embodiment, the expression of APOA1 gene is increased by a factor of at least 2, 3, 4, 5, 6, 7, 8, 9, 10, or by a factor of at least 15, 20, 25, 30, 35, 40, 45, 50, or by a factor of at least 60, 70, 80, 90, 100, in the presence of the APOA1-saRNA of the present invention compared to the expression of APOA1 gene in the absence of the APOA1-saRNA of the present invention. The modulation of the expression of APOA1 gene may be reflected or determined by the change of APOA1 mRNA levels.

[0260] APOA1-saRNAs may be single-stranded and comprise 14-30 nucleotides. The sequence of a single-stranded APOA1-saRNA may have at least 60%, 70%, 80% or 90% identity with a sequence selected from the sequences of the antisense strands in Table 2-2. In one embodiment, the single-stranded saRNA comprises a sequence selected from the sequences of the antisense strands in Table 2-2. In one embodiment, the single-stranded APOA1-saRNA may have a 3′ tail. The sequence of a single-stranded APOA1-saRNA with a 3′ tail may have at least 60%, 70%, 80% or 90% identity with a sequence selected from the sequences of the antisense strands in Table 3. In one embodiment, the single-stranded saRNA comprises a sequence selected from the sequences of the antisense strands in Table 3.

[0261] APOA1-saRNAs may be double-stranded. The two strands form a duplex and each strand comprises 14-30 nucleotides. The first strand of a double-stranded APOA1-saRNA may have at least 60%, 70%, 80% or 90% identity with a sequence selected from the sequences of the antisense strands in Table 2-2. In one embodiment, the first strand of the double-stranded saRNA comprises a sequence selected from the sequences of the antisense strands in Table 2-2. The second strand of a double-stranded APOA1-saRNA may have at least 60%, 70%, 80% or 90% identity with a sequence selected from the sequences of the sense strands in Table 2-2. In one embodiment, the second strand of the double-stranded saRNA comprises a sequence selected from the sequences of the sense strands in Table 2-2. In one embodiment, the double-stranded APOA1-saRNA may have a 3′ overhang on each strand. The first strand of a double-stranded APOA1-saRNA may have at least 60%, 70%, 80% or 90% identity with a sequence selected from the sequences of the antisense strands in Table 3. In one embodiment, the first strand of the double-stranded saRNA comprises a sequence selected from the sequences of the antisense strands in Table 3. The second strand of a double-stranded APOA1-saRNA may have at least 60%, 70%, 80% or 90% identity with a sequence selected from the sequences of the sense strands in Table 3. In one embodiment, the second strand of the double-stranded saRNA comprises a sequence selected from the sequences of the sense strands in Table 3.

[0262] APOA1-saRNAs may be modified or unmodified.

[0263] The APOA1 gene encodes a protein called apolipoprotein AI (APOA-I or APOA1). ApoA-I is a component of high-density lipoprotein (HDL). HDL is a molecule that transports cholesterol and certain fats called phospholipids through the bloodstream from the body's tissues to the liver. Once in the liver, cholesterol and phospholipids are redistributed to other tissues or removed from the body. ApoA-I protein attaches to cell membranes and promotes the movement of cholesterol and phospholipids from inside the cell to the outer surface. Once outside the cell, these substances combine with apoA-I protein to form HDL. ApoA-I protein also triggers a reaction called cholesterol esterification that converts cholesterol to a form that can be fully integrated into HDL and transported through the bloodstream. HDL is often referred to as “good cholesterol” because high levels of this substance reduce the chances of developing heart and blood vessel (cardiovascular) disease. The process of removing excess cholesterol from cells is extremely important for balancing cholesterol levels and maintaining cardiovascular health. Mutations in APOA1 gene cause various diseases such as familial HDL deficiency and familial visceral amyloidosis (Santos et al., J Lipid Res, vol. 49 (2):349 (2008); Rowczenio et al., Am J Pathol, vol. 179 (4): 1978 (2011), the contents of each of which are incorporated herein by reference in their entirety). Familial HDL deficiency is characterized by low levels of HDL in the blood, which increases the risk for cardiovascular disease. Familial visceral amyloidosis is characterized by an abnormal accumulation of proteins (amyloidosis) in internal organs (viscera), in particular liver, kidneys, and heart. People with visceral amyloidosis might develop an enlarged liver, chronic kidney disease, or heart diseases such as cardiomyopathy.

[0264] Table 2-1 describes the target gene, the targeted sequence, the genomic location of the targeted sequence and the relative location of APOA1-saRNAs with no 3′ overhang. In Table 2-1, the targeted sequence is defined as a region on the template strand of the target gene which is identical to a region on the target antisense RNA transcript to which the antisense strand of an saRNA hybridizes. In Table 2-1, the relative location is the distance from the 5′ end of the targeted sequence to the TSS. A negative number represents a location upstream of the TSS and a positive number represents a location downstream of the TSS.

TABLE 2-1
Sequences of APOA1-saRNAs (with no 3′ overhang)

| | | | Genomic Location of | Relative |
|---|---|---|---|---|
| saRNA ID | Target Gene | Targeted sequence | the Targeted sequence | Location |
| APOA1-Pr-1 | APOA1 | ccagcattccagggagact | chr11: 116708231 plus | 107 |
| | human | (SEQ ID NO. 72) | strand | |
| APOA1-Pr-2 | APOA1 | ggctgagatctgagccgaa | chr11: 116707412 plus | 926 |
| | human | (SEQ ID NO. 73) | strand | |
| APOA1-Pr-4 | APOA1 | cccagctcatcagatatta | chr11: 116707610 plus | 728 |
| | human | (SEQ ID NO. 74) | strand | |
| APOA1-mm10-Pr-1 | APOA1 | gcgagatatccacggtatt | chr11: 116707639 plus | 699 |
| | mouse | (SEQ ID NO. 75) | strand | |
| APOA1-mm10-Pr-2 | APOA1 | gtgtatgtcttcttcaaga | chr11: 116708035 plus | 303 |
| | mouse | (SEQ ID NO. 76) | strand | |
| APOA1-mm10-Pr-3 | APOA1 | gaggcattgtcatggaaag | chr11: 116707568 plus | 770 |
| | mouse | (SEQ ID NO. 77) | strand | |
| APOA1-mm10-Pr-4 | APOA1 | gggatttgtctttccagat | chr11: 116708227 plus | 111 |
| | mouse | (SEQ ID NO. 78) | strand | |
| APOA1-rn5-Pr-1 | APOA1 rat | cagctttcatcctgaagga | chr11: 116707587 plus | 751 |
| | | (SEQ ID NO. 79) | strand | |
| APOA1-rn5-Pr-2 | APOA1 rat | cgttgcattccaagaggtt | chr11: 116708255 plus | 83 |
| | | (SEQ ID NO. 80) | strand | |
| APOA1-rn5-Pr-3 | APOA1 rat | ggaacttagagttcaagga | chr11: 116707948 plus | 390 |
| | | (SEQ ID NO. 81) | strand | |
| APOA1-rn5-Pr-4 | APOA1 rat | gggacagatcccagatatc | chr11: 116707712 plus | 626 |
| | | (SEQ ID NO. 82) | strand | |
| APOA1.NM_000039- | APOA1 | gggcataatctcagaatta | chr11: 116709049 plus | −711 |
| Pr-1 or APOA1- | human | (SEQ ID NO. 83) | strand | |
| Pr-3 | | | | |
| APOA1.NM_000039- | APOA1 | agggcataatctcagaatt | chr11: 116709048 plus | −710 |
| Pr-3 | human | (SEQ ID NO. 84) | strand | |
| APOA1.NM_000039- | APOA1 | ggcataatctcagaattac | chr11: 116709050 plus | −712 |
| Pr-6 | human | (SEQ ID NO. 85) | strand | |
| APOA1.NM_000039- | APOA1 | cccagctcatcagatatta | chr11: 116707610 plus | 728 |
| Pr-16 | human | (SEQ ID NO. 86) | strand | |
| APOA1.NM_000039- | APOA1 | cttaagagttcaaggatca | chr11: 116708450 plus | −112 |
| Pr-21 | human | (SEQ ID NO. 87) | strand | |
| APOA1.NM_000039- | APOA1 | agatattgtccgcctccaa | chr11: 116708972 plus | −634 |
| Pr-23 | human | (SEQ ID NO. 88) | strand | |
| APOA1.NM_000039- | APOA1 | agatcgtgggcaagttata | chr11: 116709259 plus | −921 |
| Pr-25 | human | (SEQ ID NO. 89) | strand | |
| APOA1.NM_000039- | APOA1 | ggctgagatctgagccgaa | chr11: 116707912 plus | 426 |
| Pr-37 | human | (SEQ ID NO. 90) | strand | |

TABLE 2-2
Sequences of APOA1-saRNAs (with no 3′ overhang)

| saRNA ID | Sense (passenger) | Antisense (guide) |
|---|---|---|
| APOA1-Pr-1 | CCAGCAUUCCAGGGAGACU | AGUCUCCCUGGAAUGCUGG |
| | (SEQ ID NO. 91) | (SEQ ID NO. 92) |
| APOA1-Pr-2 | GGCUGAGAUCUGAGCCGAA | UUCGGCUCAGAUCUCAGCC |
| | (SEQ ID NO. 93) | (SEQ ID NO. 94) |
| APOA1-Pr-4 | CCCAGCUCAUCAGAUAUUA | UAAUAUCUGAUGAGCUGGG |
| | (SEQ ID NO. 95) | (SEQ ID NO. 96) |
| APOA1-mm10-Pr-1 | GCGAGAUAUCCACGGUAUU | AAUACCGUGGAUAUCUCGC |
| | (SEQ ID NO. 97) | (SEQ ID NO. 98) |
| APOA1-mm10-Pr-2 | GUGUAUGUCUUCUUCAAGA | UCUUGAAGAAGACAUACAC |
| | (SEQ ID NO. 99) | (SEQ ID NO. 100) |
| APOA1-mm10-Pr-3 | GAGGCAUUGUCAUGGAAAG | CUUUCCAUGACAAUGCCUC |
| | (SEQ ID NO. 101) | (SEQ ID NO. 102) |
| APOA1-mm10-Pr-4 | GGGAUUUGUCUUUCCAGAU | AUCUGGAAAGACAAAUCCC |
| | (SEQ ID NO. 103) | (SEQ ID NO. 104) |
| APOA1-rn5-Pr-1 | CAGCUUUCAUCCUGAAGGA | UCCUUCAGGAUGAAAGCUG |
| | (SEQ ID NO. 105) | (SEQ ID NO. 106) |
| APOA1-rn5-Pr-2 | CGUUGCAUUCCAAGAGGUU | AACCUCUUGGAAUGCAACG |
| | (SEQ ID NO. 107) | (SEQ ID NO. 108) |
| APOA1-rn5-Pr-3 | GGAACUUAGAGUUCAAGGA | UCCUUGAACUCUAAGUUCC |
| | (SEQ ID NO. 109) | (SEQ ID NO. 110) |
| APOA1-rn5-Pr-4 | GGGACAGAUCCCAGAUAUC | GAUAUCUGGGAUCUGUCCC |
| | (SEQ ID NO. 111) | (SEQ ID NO. 112) |
| APOA1.NM_000039-Pr-1 | GGGCAUAAUCUCAGAAUUA | UAAUUCUGAGAUUAUGCCC |
| or APOA1-Pr-3 | (SEQ ID NO. 113) | (SEQ ID NO. 114) |
| APOA1.NM_000039-Pr-3 | AGGGCAUAAUCUCAGAAUU | AAUUCUGAGAUUAUGCCCU |
| | (SEQ ID NO. 115) | (SEQ ID NO. 116) |
| APOA1.NM_000039-Pr-6 | GGCAUAAUCUCAGAAUUAC | GUAAUUCUGAGAUUAUGCC |
| | (SEQ ID NO. 117) | (SEQ ID NO. 118) |
| APOA1.NM_000039-Pr- | CCCAGCUCAUCAGAUAUUA | UAAUAUCUGAUGAGCUGGG |
| 16 | (SEQ ID NO. 119) | (SEQ ID NO. 120) |
| APOA1.NM_000039-Pr- | CUUAAGAGUUCAAGGAUCA | UGAUCCUUGAACUCUUAAG |
| 21 | (SEQ ID NO. 121) | (SEQ ID NO. 122) |
| APOA1.NM_000039-Pr- | AGAUAUUGUCCGCCUCCAA | UUGGAGGCGGACAAUAUCU |
| 23 | (SEQ ID NO. 123) | (SEQ ID NO. 124) |
| APOA1.NM_000039-Pr- | AGAUCGUGGGCAAGUUAUA | UAUAACUUGCCCACGAUCU |
| 25 | (SEQ ID NO. 125) | (SEQ ID NO. 126) |
| APOA1.NM_000039-Pr- | GGCUGAGAUCUGAGCCGAA | UUCGGCUCAGAUCUCAGCC |
| 37 | (SEQ ID NO. 127) | (SEQ ID NO. 128) |

TABLE 3
Sequences of APOA1-saRNAs (with 3′ overhang)

| saRNA ID | Sense (passenger) | Antisense (guide) |
|---|---|---|
| APOA1-Pr-1′ | CCAGCAUUCCAGGGAGACUUU | AGUCUCCCUGGAAUGCUGGUU |
| | (SEQ ID NO. 129) | (SEQ ID NO. 130) |
| APOA1-Pr-2′ | GGCUGAGAUCUGAGCCGAAUU | UUCGGCUCAGAUCUCAGCCUU |
| | (SEQ ID NO. 131) | (SEQ ID NO. 132) |
| APOA1-Pr-4′ | CCCAGCUCAUCAGAUAUUAUU | UAAUAUCUGAUGAGCUGGGUU |
| | (SEQ ID NO. 133) | (SEQ ID NO. 134) |
| APOA1-mm10-Pr-1′ | GCGAGAUAUCCACGGUAUUUU | AAUACCGUGGAUAUCUCGCUU |
| | (SEQ ID NO. 135) | (SEQ ID NO. 136) |
| APOA1-mm10-Pr-2′ | GUGUAUGUCUUCUUCAAGAUU | UCUUGAAGAAGACAUACACUU |
| | (SEQ ID NO. 137) | (SEQ ID NO. 138) |
| APOA1-mm10-Pr-3′ | GAGGCAUUGUCAUGGAAAGUU | CUUUCCAUGACAAUGCCUCUU |
| | (SEQ ID NO. 139) | (SEQ ID NO. 140) |
| APOA1-mm10-Pr-4′ | GGGAUUUGUCUUUCCAGAUUU | AUCUGGAAAGACAAAUCCCUU |
| | (SEQ ID NO. 141) | (SEQ ID NO. 142) |
| APOA1-rn5-Pr-1′ | CAGCUUUCAUCCUGAAGGAUU | UCCUUCAGGAUGAAAGCUGUU |
| | (SEQ ID NO. 143) | (SEQ ID NO. 144) |
| APOA1-rn5-Pr-2′ | CGUUGCAUUCCAAGAGGUUUU | AACCUCUUGGAAUGCAACGUU |
| | (SEQ ID NO. 145) | (SEQ ID NO. 146) |
| APOA1-rn5-Pr-3′ | GGAACUUAGAGUUCAAGGAUU | UCCUUGAACUCUAAGUUCCUU |
| | (SEQ ID NO. 147) | (SEQ ID NO. 148) |
| APOA1-rn5-Pr-4′ | GGGACAGAUCCCAGAUAUCUU | GAUAUCUGGGAUCUGUCCCUU |
| | (SEQ ID NO. 149) | (SEQ ID NO. 150) |
| APOA1.NM_000039- | GGGCAUAAUCUCAGAAUUAUU | UAAUUCUGAGAUUAUGCCCUU |
| Pr-1′ or APOA1-Pr- | (SEQ ID NO. 151) | (SEQ ID NO. 152) |
| 3′ | | |
| APOA1.NM_000039- | AGGGCAUAAUCUCAGAAUUUU | AAUUCUGAGAUUAUGCCCUUU |
| Pr-3′ | (SEQ ID NO. 153) | (SEQ ID NO. 154) |
| APOA1.NM_000039- | GGCAUAAUCUCAGAAUUACUU | GUAAUUCUGAGAUUAUGCCUU |
| Pr-6′ | (SEQ ID NO. 155) | (SEQ ID NO. 156) |
| APOA1.NM_000039- | CCCAGCUCAUCAGAUAUUAUU | UAAUAUCUGAUGAGCUGGGUU |
| Pr-16′ | (SEQ ID NO. 157) | (SEQ ID NO. 158) |
| APOA1.NM_000039- | CUUAAGAGUUCAAGGAUCAUU | UGAUCCUUGAACUCUUAAGUU |
| Pr-21′ | (SEQ ID NO. 159) | (SEQ ID NO. 160) |
| APOA1.NM_000039- | AGAUAUUGUCCGCCUCCAAUU | UUGGAGGCGGACAAUAUCUUU |
| Pr-23′ | (SEQ ID NO. 161) | (SEQ ID NO. 162) |
| APOA1.NM_000039- | AGAUCGUGGGCAAGUUAUAUU | UAUAACUUGCCCACGAUCUUU |
| Pr-25′ | (SEQ ID NO. 163) | (SEQ ID NO. 164) |
| APOA1.NM_000039- | GGCUGAGAUCUGAGCCGAAUU | UUCGGCUCAGAUCUCAGCCUU |
| Pr-37′ | (SEQ ID NO. 165) | (SEQ ID NO. 166) |

[0265] In one embodiment, provided is a method of increasing apoA-I protein levels comprising administering APOA1-saRNA of the present invention, wherein the APOA1-saRNA targets an antisense RNA transcript of APOA1 gene. In one embodiment, the apoA-I protein level is increased by at least 20, 30, 40%, or at least 45, 50, 55, 60, 65, 70, 75%, or at least 80% in the presence of the APOA1-saRNA of the present invention compared to apoA-I protein level in the absence of the APOA1-saRNA of the present invention. In a further embodiment, the apoA-I protein level is increased by a factor of at least 2, 3, 4, 5, 6, 7, 8, 9, 10, or by a factor of at least 15, 20, 25, 30, 35, 40, 45, 50, or by a factor of at least 60, 70, 80, 90, 100, in the presence of the APOA1-saRNA of the present invention compared to the apoA-I protein level in the absence of the APOA1-saRNA of the present invention.

[0266] In another embodiment, provided is a method of modulating HDL levels in a cell or in the blood comprising administering APOA1-saRNA of the present invention, wherein the APOA1-saRNA targets an antisense RNA transcript of APOA1 gene. In one embodiment, HDL level is increased by at least 20, 30, 40%, or at least 45, 50, 55, 60, 65, 70, 75%, or at least 80% in the presence of the APOA1-saRNA of the present invention compared to HDL level in the absence of the APOA1-saRNA of the present invention. In another embodiment, HDL level is increased by a factor of at least 2, 3, 4, 5, 6, 7, 8, 9, 10, or by a factor of at least 15, 20, 25, 30, 35, 40, 45, 50, or by a factor of at least 60, 70, 80, 90, 100, in the presence of the APOA1-saRNA of the present invention compared to HDL level in the absence of the APOA1-saRNA of the present invention.

[0267] In another embodiment, provided is a method of modulating cholesterol levels comprising administering APOA1-saRNA of the present invention, wherein the saRNA targets an antisense RNA transcript of APOA1 gene. In one embodiment, cholesterol level is reduced by at least 10%, 20%, 30%, or at least 40%, 50%, 60%, or at least 70%, 80%, 90% in the presence of the APOA1-saRNA of the present invention compared to cholesterol level in the absence of the APOA1-saRNA of the present invention.

[0268] In another embodiment, provided is a method of treating familial HDL deficiency or familial visceral amyloidosis comprising administering APOA1-saRNA of the present invention, wherein the APOA1-saRNA targets an antisense RNA transcript of APOA1 gene, and wherein the symptoms of familial HDL deficiency or familial visceral amyloidosis are reduced.

[0269] In one embodiment, the APOA1-saRNA of the present invention is an antisense sequence such as, but not limited to, SEQ ID NO: 92, 94, 96, 98, 100, 102, 104, 106, 108, 110, 112, 114, 116, 118, 120, 122, 124, 126, 128, 130, 132, 134, 136, 138, 140, 142, 144, 146, 148, 150, 152, 154, 156, 158, 160, 162, 164, 166, 2062, 2064, 2066, 2068, 2070, 2072, 2074, 2076, 2078, 2080, 2082, 2084, 2086, 2088, 2090, 2092, 2094, 2096, 2098, 2100, 2102, 2104, 2106, 2108, 2110, 2112, 2114, 2116, 2118, 2120, 2122, 2124, 2126, 2128, 2130, 2132, 2134, 2136, 2138, 2140, 2142, 2144, 2146, 2148, 2150, 2152, 2154, 2156, 2158 and 2160. As a non-limiting example, these APOA1-saRNA sequences may be used to increase APOAI protein levels, modulate HDL levels in a cell or the blood, modulate cholesterol levels and/or treat familial HDL deficiency or familial visceral amyloidosis.

[0270] In one embodiment, the APOA1-saRNA of the present invention is an saRNA duplex. The saRNA duplex may be a pair of sense and antisense sequences such as, but not limited to, SEQ ID NOs: 91 and 92; SEQ ID NOs: 93 and 94; SEQ ID NOs: 95 and 96; SEQ ID NOs: 97 and 98; SEQ ID NOs: 99 and 100; SEQ ID NOs: 101 and 102; SEQ ID NOs: 103 and 104; SEQ ID NOs: 105 and 106; SEQ ID NOs: 107 and 108; SEQ ID NOs: 109 and 110; SEQ ID NOs: 111 and 112; SEQ ID NOs: 113 and 114; SEQ ID NOs: 115 and 116; SEQ ID NOs: 117 and 118; SEQ ID NOs: 119 and 120; SEQ ID NOs: 121 and 122; SEQ ID NOs: 123 and 124; SEQ ID NOs: 125 and 126; SEQ ID NOs: 127 and 128; SEQ ID NOs: 129 and 130; SEQ ID NOs: 131 and 132; SEQ ID NOs: 133 and 134; SEQ ID NOs: 135 and 136; SEQ ID NOs: 137 and 138; SEQ ID NOs: 139 and 140; SEQ ID NOs: 141 and 142; SEQ ID NOs: 143 and 144; SEQ ID NOs: 145 and 146; SEQ ID NOs: 147 and 148; SEQ ID NOs: 149 and 150; SEQ ID NOs: 151 and 152; SEQ ID NOs: 153 and 154; SEQ ID NOs: 155 and 156; SEQ ID NOs: 157 and 158; SEQ ID NOs: 159 and 160; SEQ ID NOs: 161 and 162; SEQ ID NOs: 163 and 164; SEQ ID NOs: 165 and 166; SEQ ID NOs: 2061 and 2062; SEQ ID NOs: 2063 and 2064; SEQ ID NOs: 2065 and 2066; SEQ ID NOs: 2067 and 2068; SEQ ID NOs: 2069 and 2070; SEQ ID NOs: 2071 and 2072; SEQ ID NOs: 2073 and 2074; SEQ ID NOs: 2075 and 2076; SEQ ID NOs: 2077 and 2078; SEQ ID NOs: 2079 and 2080; SEQ ID NOs: 2081 and 2082; SEQ ID NOs: 2083 and 2084; SEQ ID NOs: 2085 and 2086; SEQ ID NOs: 2087 and 2088; SEQ ID NOs: 2089 and 2090; SEQ ID NOs: 2091 and 2092; SEQ ID NOs: 2093 and 2094; SEQ ID NOs: 2095 and 2096; SEQ ID NOs: 2097 and 2098; SEQ ID NOs: 2099 and 2100; SEQ ID NOs: 2101 and 2102; SEQ ID NOs: 2103 and 2104; SEQ ID NOs: 2105 and 2106; SEQ ID NOs: 2107 and 2108; SEQ ID NOs: 2109 and 2110; SEQ ID NOs: 2111 and 2112; SEQ ID NOs: 2113 and 2114; SEQ ID NOs: 2115 and 2116; SEQ ID NOs: 2117 and 2118; SEQ ID NOs: 2119 and 2120; SEQ ID NOs: 2121 and 2122; SEQ ID NOs: 2123 and 2124; SEQ ID NOs: 2125 and 2126; SEQ ID NOs: 2127 and 2128; SEQ ID NOs: 2129 and 2130; SEQ ID NOs: 2131 and 2132; SEQ ID NOs: 2133 and 2134; SEQ ID NOs: 2135 and 2136; SEQ ID NOs: 2137 and 2138; SEQ ID NOs: 2139 and 2140; SEQ ID NOs: 2141 and 2142; SEQ ID NOs: 2143 and 2144; SEQ ID NOs: 2145 and 2146; SEQ ID NOs: 2147 and 2148; SEQ ID NOs: 2149 and 2150; SEQ ID NOs: 2151 and 2152; SEQ ID NOs: 2153 and 2154; SEQ ID NOs: 2155 and 2156; SEQ ID NOs: 2157 and 2158; SEQ ID NOs: 2159 and 2160. As a non-limiting example, these APOA1-saRNA sequences which are saRNA duplexes may be used to increase APOAI protein levels, modulate HDL levels in a cell or the blood, modulate cholesterol levels and/or treat familial HDL deficiency or familial visceral amyloidosis.

### LDLR Gene

[0271] As another non-limiting example, provided is a method of modulating the expression of LDLR gene comprising administering saRNA of the present invention, wherein the saRNA targets an antisense RNA transcript of LDLR gene. These saRNAs are called LDLR-saRNA. In one embodiment, the expression of LDLR gene is increased by at least 20, 30, 40%, or at least 45, 50, 55, 60, 65, 70, 75%, or at least 80% in the presence of the LDLR-saRNA of the present invention compared to the expression of LDLR gene in the absence of the LDLR-saRNA of the present invention. In a further embodiment, the expression of LDLR is increased by a factor of at least 2, 3, 4, 5, 6, 7, 8, 9, 10, or by a factor of at least 15, 20, 25, 30, 35, 40, 45, 50, or by a factor of at least 60, 70, 80, 90, 100, in the presence of the LDLR-saRNA of the present invention compared to the expression of LDLR gene in the absence of the LDLR-saRNA of the present invention. The modulation of the expression of LDLR gene may be reflected or determined by the change of LDLR mRNA levels.

[0272] LDLR-saRNAs may be single-stranded and comprise 14-30 nucleotides. The sequence of a single-stranded LDLR-saRNA may have at least 60%, 70%, 80% or 90% identity with a sequence selected from the sequences of the antisense strands in Table 4-2. In one embodiment, the single-stranded saRNA comprises a sequence selected from the sequences of the antisense strands in Table 4-2. In one embodiment, the single-stranded LDLR-saRNA may have a 3′ tail. The sequence of a single-stranded LDLR-saRNA with a 3′ tail may have at least 60%, 70%, 80% or 90% identity with a sequence selected from the sequences of the antisense strands in Table 5. In one embodiment, the single-stranded saRNA comprises a sequence selected from the sequences of the antisense strands in Table 5.

[0273] LDLR-saRNAs may be double-stranded. The two strands form a duplex and each strand comprises 14-30 nucleotides. The first strand of a double-stranded LDLR-saRNA may have at least 60%, 70%, 80% or 90% identity with a sequence selected from the sequences of the antisense strands in Table 4-2. In one embodiment, the first strand of the double-stranded saRNA comprises a sequence selected from the sequences of the antisense strands in Table 4-2. The second strand of a double-stranded LDLR-saRNA may have at least 60%, 70%, 80% or 90% identity with a sequence selected from the sequences of the sense strands in Table 4-2. In one embodiment, the second strand of the double-stranded saRNA comprises a sequence selected from the sequences of the sense strands in Table 4-2. In one embodiment, the double-stranded LDLR-saRNA may have a 3′ overhang on each strand. The first strand of a double-stranded LDLR-saRNA may have at least 60%, 70%, 80% or 90% identity with a sequence selected from the sequences of the antisense strands in Table 5. In one embodiment, the first strand of the double-stranded saRNA comprises a sequence selected from the sequences of the antisense strands in Table 5. The second strand of a double-stranded LDLR-saRNA may have at least 60%, 70%, 80% or 90% identity with a sequence selected from the sequences of the sense strands in Table 5. In one embodiment, the second strand of the double-stranded saRNA comprises a sequence selected from the sequences of the sense strands in Table 5.

[0274] LDLR-saRNAs may be modified or unmodified.

[0275] Table 4-1 describes the target gene, the targeted sequence, the genomic location of the targeted sequence and the relative location of LDLR-saRNAs with no 3′ overhang. In Table 4-1, the targeted sequence is defined as a region on the template strand of the target gene which is identical to a region on the target antisense RNA transcript to which the antisense strand of an saRNA hybridizes. In Table 4-1, the relative location is the distance from the 5′ end of the targeted sequence to the TSS. A negative number represents a location upstream of the TSS and a positive number represents a location downstream of the TSS.

TABLE 4-1
Sequences of LDLR-saRNAs (with no 3′ overhang)

| | | | Genomic Location of | Relative |
|---|---|---|---|---|
| saRNA ID | Target gene | Targeted sequence | the Targeted sequence | Location |
| LDLR-Pr-1 | LDLR human | gaaatttctcgatgtttaa | chr19: 111100342 | 324 |
| | | (SEQ ID NO. 167) | minus strand | |
| LDLR-Pr-2 | LDLR human | aacgcatcttctgaaagat | chr19: 111100367 | 349 |
| | | (SEQ ID NO. 168) | minus strand | |
| LDLR-Pr-4 | LDLR human | gcctgtaatcccagctatt | chr19: 111100664 | 646 |
| | | (SEQ ID NO. 169) | minus strand | |
| LDLR-mm10-Pr-1 | LDLR mouse | gtgggaagttcctcaaatt | chr19: 111100418 | 400 |
| | | (SEQ ID NO. 170) | minus strand | |
| LDLR-mm10-Pr-2 | LDLR mouse | gttgtatttctcgaccaaa | chr19: 111100883 | 865 |
| | | (SEQ ID NO. 171) | minus strand | |
| LDLR-mm10-Pr-3 | LDLR mouse | gaaatgttcccgctgcaaa | chr19: 111100678 | 660 |
| | | (SEQ ID NO. 172) | minus strand | |
| LDLR-mm10-Pr-4 | LDLR mouse | tagatttctgacccaagta | chr19: 111100184 | 166 |
| | | (SEQ ID NO. 173) | minus strand | |
| LDLR-rn5-Pr-1 | LDLR rat | gaaatgttcccgctgcaaa | chr19: 111100631 | 613 |
| | | (SEQ ID NO. 174) | minus strand | |
| LDLR-rn5-Pr-2 | LDLR rat | caagttcgcatgagtgatt | chr19: 111100850 | 832 |
| | | (SEQ ID NO. 175) | minus strand | |
| LDLR-rn5-Pr-3 | LDLR rat | tcgagttcctccttcagaa | chr19: 111100329 | 311 |
| | | (SEQ ID NO. 176) | minus strand | |
| LDLR-rn5-Pr-4 | LDLR rat | cacacatagctctgaagaa | chr19: 111100987 | 969 |
| | | (SEQ ID NO. 177) | minus strand | |
| LDLR.NM_000527- | LDLR human | gaaatttctcgatgtttaa | chr19: 11199842 minus | −176 |
| Pr-4 | | (SEQ ID NO. 178) | strand | |
| LDLR.NM_000527- | LDLR human | aacgcatcttctgaaagat | chr19: 11199867 minus | −151 |
| Pr-6 | | (SEQ ID NO. 179) | strand | |
| LDLR.NM_000527- | LDLR human | cctgaaatttctcgatgtt | chr19: 11199845 minus | −173 |
| Pr-7 | | (SEQ ID NO. 180) | strand | |
| LDLR.NM_000527- | LDLR human | ggagtctggacgtaaatat | chr19: 11199468 minus | −550 |
| Pr-13 or LDLR-Pr-3 | | (SEQ ID NO. 181) | strand | |
| LDLR.NM_000527- | LDLR human | cgcctttggctgagtata | chr19: 11199517 minus | −501 |
| Pr-22 | | (SEQ ID NO. 182) | strand | |
| LDLR.NM_000527- | LDLR human | gcctttggctgagtataaa | chr19: 11199516 minus | −502 |
| Pr-23 | | (SEQ ID NO. 183) | strand | |
| LDLR.NM_000527- | LDLR human | aaacgcatcttctgaaaga | chr19: 11199868 minus | −150 |
| Pr-28 | | (SEQ ID NO. 184) | strand | |

TABLE 4-2
Sequences of LDLR-saRNAs (with no 3′ overhang)

| saRNA ID | Sense (passenger) | Antisense (guide) |
|---|---|---|
| LDLR-Pr-1 | GAAAUUUCUCGAUGUUUAA | UUAAACAUCGAGAAAUUUC |
| | (SEQ ID NO. 185) | (SEQ ID NO. 186) |
| LDLR-Pr-2 | AACGCAUCUUCUGAAAGAU | AUCUUUCAGAAGAUGCGUU |
| | (SEQ ID NO. 187) | (SEQ ID NO. 188) |
| LDLR-Pr-4 | GCCUGUAAUCCCAGCUAUU | AAUAGCUGGGAUUACAGGC |
| | (SEQ ID NO. 189) | (SEQ ID NO. 190) |
| LDLR-mm10-Pr-1 | GUGGGAAGUUCCUCAAAUU | AAUUUGAGGAACUUCCCAC |
| | (SEQ ID NO. 191) | (SEQ ID NO. 192) |
| LDLR-mm10-Pr-2 | GUUGUAUUUCUCGACCAAA | UUUGGUCGAGAAAUACAAC |
| | (SEQ ID NO. 193) | (SEQ ID NO. 194) |
| LDLR-mm10-Pr-3 | GAAAUGUUCCCGCUGCAAA | UUUGCAGCGGGAACAUUUC |
| | (SEQ ID NO. 195) | (SEQ ID NO. 196) |
| LDLR-mm10-Pr-4 | UAGAUUUCUGACCCAAGUA | UACUUGGGUCAGAAAUCUA |
| | (SEQ ID NO. 197) | (SEQ ID NO. 198) |
| LDLR-rn5-Pr-1 | GAAAUGUUCCCGCUGCAAA | UUUGCAGCGGGAACAUUUC |
| | (SEQ ID NO. 199) | (SEQ ID NO. 200) |
| LDLR-rn5-Pr-2 | CAAGUUCGCAUGAGUGAUU | AAUCACUCAUGCGAACUUG |
| | (SEQ ID NO. 201) | (SEQ ID NO. 202) |
| LDLR-rn5-Pr-3 | UCGAGUUCCUCCUUCAGAA | UUCUGAAGGAGGAACUCGA |
| | (SEQ ID NO. 203) | (SEQ ID NO. 204) |
| LDLR-rn5-Pr-4 | CACACAUAGCUCUGAAGAA | UUCUUCAGAGCUAUGUGUG |
| | (SEQ ID NO. 205) | (SEQ ID NO. 206) |
| LDLR.NM_000527- | GAAAUUUCUCGAUGUUUAA | UUAAACAUCGAGAAAUUUC |
| Pr-4 | (SEQ ID NO. 207) | (SEQ ID NO. 208) |
| LDLR.NM_000527- | AACGCAUCUUCUGAAAGAU | AUCUUUCAGAAGAUGCGUU |
| Pr-6 | (SEQ ID NO. 209) | (SEQ ID NO. 210) |
| LDLR.NM_000527- | CCUGAAAUUUCUCGAUGUU | AACAUCGAGAAAUUUCAGG |
| Pr-7 | (SEQ ID NO. 211) | (SEQ ID NO. 212) |
| LDLR.NM_000527- | GGAGUCUGGACGUAAAUAU | AUAUUUACGUCCAGACUCC |
| Pr-13 or LDLR-Pr-3 | (SEQ ID NO. 213) | (SEQ ID NO. 214) |
| LDLR.NM_000527- | CGCCUUUGGCUGAGUAUAA | UUAUACUCAGCCAAAGGCG |
| Pr-22 | (SEQ ID NO. 215) | (SEQ ID NO. 216) |
| LDLR.NM_000527- | GCCUUUGGCUGAGUAUAAA | UUUAUACUCAGCCAAAGGC |
| Pr-23 | (SEQ ID NO. 217) | (SEQ ID NO. 218) |
| LDLR.NM_000527- | AAACGCAUCUUCUGAAAGA | UCUUUCAGAAGAUGCGUUU |
| Pr-28 | (SEQ ID NO. 219) | (SEQ ID NO. 220) |

TABLE 5
Sequences of LDLR-saRNAs (with 3′ overhang)

| saRNA ID | Sense (passenger) | Antisense (guide) |
|---|---|---|
| LDLR-Pr-1′ | GAAAUUUCUCGAUGUUUAAUU (SEQ | UUAAACAUCGAGAAAUUUCUU |
| | ID NO. 221) | (SEQ ID NO. 222) |
| LDLR-Pr-2′ | AACGCAUCUUCUGAAAGAUUU (SEQ | AUCUUUCAGAAGAUGCGUUUU |
| | ID NO. 223) | (SEQ ID NO. 224) |
| LDLR-Pr-4′ | GCCUGUAAUCCCAGCUAUUUU (SEQ | AAUAGCUGGGAUUACAGGCUU |
| | ID NO. 225) | (SEQ ID NO. 226) |
| LDLR-mm10-Pr-1′ | GUGGGAAGUUCCUCAAAUUUU (SEQ | AAUUUGAGGAACUUCCCACUU |
| | ID NO. 227) | (SEQ ID NO. 228) |
| LDLR-mm10-Pr-2′ | GUUGUAUUUCUCGACCAAAUU (SEQ | UUUGGUCGAGAAAUACAACUU |
| | ID NO. 229) | (SEQ ID NO. 230) |
| LDLR-mm10-Pr-3′ | GAAAUGUUCCCGCUGCAAAUU (SEQ | UUUGCAGCGGGAACAUUUCUU |
| | ID NO. 231) | (SEQ ID NO. 232) |
| LDLR-mm10-Pr-4′ | UAGAUUUCUGACCCAAGUAUU (SEQ | UACUUGGGUCAGAAAUCUAUU |
| | ID NO. 233) | (SEQ ID NO. 234) |
| LDLR-rn5-Pr-1′ | GAAAUGUUCCCGCUGCAAAUU (SEQ | UUUGCAGCGGGAACAUUUCUU |
| | ID NO. 235) | (SEQ ID NO. 236) |
| LDLR-rn5-Pr-2′ | CAAGUUCGCAUGAGUGAUUUU (SEQ | AAUCACUCAUGCGAACUUGUU |
| | ID NO. 237) | (SEQ ID NO. 238) |
| LDLR-rn5-Pr-3′ | UCGAGUUCCUCCUUCAGAAUU (SEQ | UUCUGAAGGAGGAACUCGAUU |
| | ID NO. 239) | (SEQ ID NO. 240) |
| LDLR-rn5-Pr-4′ | CACACAUAGCUCUGAAGAAUU (SEQ | UUCUUCAGAGCUAUGUGUGUU |
| | ID NO. 241) | (SEQ ID NO. 242) |
| LDLR.NM_000527- | GAAAUUUCUCGAUGUUUAAUU (SEQ | UUAAACAUCGAGAAAUUUCUU |
| Pr-4′ | ID NO. 243) | (SEQ ID NO. 244) |
| LDLR.NM_000527- | AACGCAUCUUCUGAAAGAUUU (SEQ | AUCUUUCAGAAGAUGCGUUUU |
| Pr-6′ | ID NO. 245) | (SEQ ID NO. 246) |
| LDLR.NM_000527- | CCUGAAAUUUCUCGAUGUUUU (SEQ | AACAUCGAGAAAUUUCAGGUU |
| Pr-7′ | ID NO. 247) | (SEQ ID NO. 248) |
| LDLR.NM_000527- | GGAGUCUGGACGUAAAUAUUU (SEQ | AUAUUUACGUCCAGACUCCUU |
| Pr-13′ or LDLR-Pr- | ID NO. 249) | (SEQ ID NO. 250) |
| 3′ | | |
| LDLR.NM_000527- | CGCCUUUGGCUGAGUAUAAUU (SEQ | UUAUACUCAGCCAAAGGCGUU |
| Pr-22′ | ID NO. 251) | (SEQ ID NO. 252) |
| LDLR.NM_000527- | GCCUUUGGCUGAGUAUAAAUU (SEQ | UUUAUACUCAGCCAAAGGCUU |
| Pr-23′ | ID NO. 253) | (SEQ ID NO. 254) |
| LDLR.NM_000527- | AAACGCAUCUUCUGAAAGAUU (SEQ | UCUUUCAGAAGAUGCGUUUUU |
| Pr-28′ | ID NO. 255) | (SEQ ID NO. 256) |

[0276] The LDLR gene encodes a protein called a low-density lipoprotein receptor. This receptor binds to particles called low-density lipoproteins (LDLs), which are the primary carriers of cholesterol in the blood. Cholesterol is a waxy, fat-like substance that is produced in the body and obtained from foods that come from animals. Low-density lipoprotein receptors sit on the outer surface of many types of cells, where they pick up low-density lipoproteins circulating in the bloodstream and transport them into the cell. Once inside the cell, the low-density lipoprotein is broken down to release cholesterol. The cholesterol is then used by the cell, stored, or removed from the body. After low-density lipoprotein receptors drop off their cargo, they are recycled back to the cell surface to pick up more low-density lipoproteins. Low-density lipoprotein receptors play a critical role in regulating the amount of cholesterol in the blood. They are particularly abundant in the liver, which is the organ responsible for removing most excess cholesterol from the body. The number of low-density lipoprotein receptors on the surface of liver cells determines how quickly cholesterol (in the form of low-density lipoproteins) is removed from the bloodstream. Mutations of LDLR gene cause various diseases such as hypercholesterolemia, which is characterized by high blood cholesterol levels (Lye et al., PLoS One, vol. 8 (4):e60729 (2013), the contents of which are incorporated herein by reference in their entirety). A buildup of cholesterol in the walls of arteries increases a person's risk of having a heart attack.

[0277] In one embodiment, provided is a method of modulating low-density lipoprotein receptor protein levels comprising administering LDLR-saRNA of the present invention, wherein the saRNA targets an antisense RNA transcript of LDLR gene. Low-density lipoprotein receptor protein level may be increased by at least 20, 30, 40%, or at least 45, 50, 55, 60, 65, 70, 75%, or at least 80% in the presence of the LDLR-saRNA of the present invention compared to low-density lipoprotein receptor protein level in the absence of the LDLR-saRNA of the present invention. In a further embodiment, low-density lipoprotein receptor protein level is increased by a factor of at least 2, 3, 4, 5, 6, 7, 8, 9, 10, or by a factor of at least 15, 20, 25, 30, 35, 40, 45, 50, or by a factor of at least 60, 70, 80, 90, 100, in the presence of the LDLR-saRNA of the present invention compared to low-density lipoprotein receptor protein level in the absence of the LDLR-saRNA of the present invention.

[0278] In another embodiment, provided is a method of modulating cholesterol levels comprising administering LDLR-saRNA of the present invention, wherein the LDLR-saRNA targets an antisense RNA transcript of LDLR gene. Cholesterol level may be reduced by at least 10%, 20%, 30%, or at least 40%, 50%, 60%, or 70%, 80%, 90% in the presence of the LDLR-saRNA of the present invention compared to cholesterol level in the absence of the LDLR-saRNA of the present invention.

[0279] In another embodiment, provided is a method of treating hypercholesterolemia comprising administering LDLR-saRNA of the present invention, wherein the LDLR-saRNA targets an antisense RNA transcript of LDLR gene, and wherein the symptoms of hypercholesterolemia is reduced.

[0280] In one embodiment, the LDLR-saRNA of the present invention is an antisense sequence such as, but not limited to, SEQ ID NO: 186, 188, 190, 192, 194, 196, 198, 200, 202, 204, 206, 208, 210, 212, 214, 216, 218, 220, 222, 224, 226, 228, 230, 232, 234, 236, 238, 240, 242, 244, 246, 248, 250, 252, 254, 256, 4610, 4612, 4614, 4616, 4618, 4620, 4622, 4624, 4626, 4628, 4630, 4632, 4634, 4636, 4638, 4640, 4642, 4644, 4646, 4648, 4650, 4652, 4654, 4656, 4658, 4660, 4662, 4664, 4666, 4668, 4670, 4672, 4674, 4676, 4678, 4680, 4682, 4684, 4686, 4688, 4690, 4692, 4694, 4696, 4698, 4700, 4702, 4704, 4706, and 4708. As a non-limiting example, the LDLR-saRNA may be used to modulate low-density lipoprotein receptor protein levels, modulate cholesterol levels and/or treating hypercholesterolemia.

[0281] In one embodiment, the APOA1-saRNA of the present invention is an saRNA duplex. The saRNA duplex may be a pair of sense and antisense sequences such as, but not limited to, SEQ ID NOs: 185 and 186; SEQ ID NOs: 187 and 188; SEQ ID NOs: 189 and 190; SEQ ID NOs: 191 and 192; SEQ ID NOs: 193 and 194; SEQ ID NOs: 195 and 196; SEQ ID NOs: 197 and 198; SEQ ID NOs: 199 and 200; SEQ ID NOs: 201 and 202; SEQ ID NOs: 203 and 204; SEQ ID NOs: 205 and 206; SEQ ID NOs: 207 and 208; SEQ ID NOs: 209 and 210; SEQ ID NOs: 211 and 212; SEQ ID NOs: 213 and 214; SEQ ID NOs: 215 and 216; SEQ ID NOs: 217 and 218; SEQ ID NOs: 219 and 220; SEQ ID NOs: 221 and 222; SEQ ID NOs: 223 and 224; SEQ ID NOs: 225 and 226; SEQ ID NOs: 227 and 228; SEQ ID NOs: 229 and 230; SEQ ID NOs: 231 and 232; SEQ ID NOs: 233 and 234; SEQ ID NOs: 235 and 236; SEQ ID NOs: 237 and 238; SEQ ID NOs: 239 and 240; SEQ ID NOs: 241 and 242; SEQ ID NOs: 243 and 244; SEQ ID NOs: 245 and 246; SEQ ID NOs: 247 and 248; SEQ ID NOs: 249 and 250; SEQ ID NOs: 251 and 252; SEQ ID NOs: 253 and 254; SEQ ID NOs: 255 and 256; SEQ ID NOs: 4609 and 4610; SEQ ID NOs: 4611 and 4612; SEQ ID NOs: 4613 and 4614; SEQ ID NOs: 4615 and 4616; SEQ ID NOs: 4617 and 4618; SEQ ID NOs: 4619 and 4620; SEQ ID NOs: 4621 and 4622; SEQ ID NOs: 4623 and 4624; SEQ ID NOs: 4625 and 4626; SEQ ID NOs: 4627 and 4628; SEQ ID NOs: 4629 and 4630; SEQ ID NOs: 4631 and 4632; SEQ ID NOs: 4633 and 4634; SEQ ID NOs: 4635 and 4636; SEQ ID NOs: 4637 and 4638; SEQ ID NOs: 4639 and 4640; SEQ ID NOs: 4641 and 4642; SEQ ID NOs: 4643 and 4644; SEQ ID NOs: 4645 and 4646; SEQ ID NOs: 4647 and 4648; SEQ ID NOs: 4649 and 4650; SEQ ID NOs: 4651 and 4652; SEQ ID NOs: 4653 and 4654; SEQ ID NOs: 4655 and 4656; SEQ ID NOs: 4657 and 4658; SEQ ID NOs: 4659 and 4660; SEQ ID NOs: 4661 and 4662; SEQ ID NOs: 4663 and 4664; SEQ ID NOs: 4665 and 4666; SEQ ID NOs: 4667 and 4668; SEQ ID NOs: 4669 and 4670; SEQ ID NOs: 4671 and 4672; SEQ ID NOs: 4673 and 4674; SEQ ID NOs: 4675 and 4676; SEQ ID NOs: 4677 and 4678; SEQ ID NOs: 4679 and 4680; SEQ ID NOs: 4681 and 4682; SEQ ID NOs: 4683 and 4684; SEQ ID NOs: 4685 and 4686; SEQ ID NOs: 4687 and 4688; SEQ ID NOs: 4689 and 4690; SEQ ID NOs: 4691 and 4692; SEQ ID NOs: 4693 and 4694; SEQ ID NOs: 4695 and 4696; SEQ ID NOs: 4697 and 4698; SEQ ID NOs: 4699 and 4700; SEQ ID NOs: 4701 and 4702; SEQ ID NOs: 4703 and 4704; SEQ ID NOs: 4705 and 4706; SEQ ID NOs: 4707 and 4708. As a non-limiting example, the LDLR-saRNA which are saRNA duplexes may be used to modulate low-density lipoprotein receptor protein levels, modulate cholesterol levels and/or treating hypercholesterolemia.

### DMD Gene

[0282] As another non-limiting example, provided is a method of modulating the expression of DMD gene comprising administering saRNA of the present invention, wherein the saRNA targets an antisense RNA transcript of DMD gene. These saRNAs are called DMD-saRNA. In one embodiment, the expression of DMD gene is increased by at least 20, 30, 40%, or at least 45, 50, 55, 60, 65, 70, 75%, or at least 80% in the presence of the DMD-saRNA of the present invention compared to the expression of DMD gene in the absence of the DMD-saRNA of the present invention. In a further embodiment, the expression of DMD gene is increased by a factor of at least 2, 3, 4, 5, 6, 7, 8, 9, 10, or by a factor of at least 15, 20, 25, 30, 35, 40, 45, 50, or by a factor of at least 60, 70, 80, 90, 100, in the presence of the DMD-saRNA of the present invention compared to the expression of DMD gene in the absence of the DMD-saRNA of the present invention. The modulation of the expression of DMD gene may be reflected or determined by the change of DMD mRNA levels.

[0283] DMD-saRNAs may be single-stranded and comprise 14-30 nucleotides. The sequence of a single-stranded DMD-saRNA may have at least 60%, 70%, 80% or 90% identity with a sequence selected from the sequences of the antisense strands in Table 6-2. In one embodiment, the single-stranded saRNA comprises a sequence selected from the sequences of the antisense strands in Table 6, i.e., SEQ ID NOS 310, 312, 314, 316, 318, 320, 322, 324, 326, 328, 330, 332, 334, 336, 338, 340, 342, 344, 346, 348, 350, 352, 354, 356, 358, 360, 362, 364, 366, 368, 370, 372, 374, 376, 378, 380, 382, 384, 386, 388, 390, 392, 394, 396, 398, 400, 402, 404, 406, 408, 410, and 412. In one embodiment, the single-stranded DMD-saRNA may have a 3′ tail. The sequence of a single-stranded DMD-saRNA with a 3′ tail may have at least 60%, 70%, 80% or 90% identity with a sequence selected from the sequences of the antisense strands in Table 7. In one embodiment, the single-stranded saRNA comprises a sequence selected from the sequences of the antisense strands in Table 7.

[0284] DMD-saRNAs may be double-stranded. The two strands form a duplex and each strand comprises 14-30 nucleotides. The first strand of a double-stranded DMD-saRNA may have at least 60%, 70%, 80% or 90% identity with a sequence selected from the sequences of the antisense strands in Table 6-2. In one embodiment, the first strand of the double-stranded saRNA comprises a sequence selected from the sequences of the antisense strands in Table 6-2. The second strand of a double-stranded DMD-saRNA may have at least 60%, 70%, 80% or 90% identity with a sequence selected from the sequences of the sense strands in Table 6-2. In one embodiment, the second strand of the double-stranded saRNA comprises a sequence selected from the sequences of the sense strands in Table 6-2. In one embodiment, the double-stranded DMD-saRNA may have a 3′ overhang on each strand. The first strand of a double-stranded DMD-saRNA may have at least 60%, 70%, 80% or 90% identity with a sequence selected from the sequences of the antisense strands in Table 7. In one embodiment, the first strand of the double-stranded saRNA comprises a sequence selected from the sequences of the antisense strands in Table 7. The second strand of a double-stranded DMD-saRNA may have at least 60%, 70%, 80% or 90% identity with a sequence selected from the sequences of the sense strands in Table 7. In one embodiment, the second strand of the double-stranded saRNA comprises a sequence selected from the sequences of the sense strands in Table 7.

[0285] DMD-saRNAs may be modified or unmodified.

[0286] Table 6-1 describes the target gene, the targeted sequence, the genomic location of the targeted sequence and the relative location of DMD-saRNAs with no 3′ overhang. In Table 6-1, the targeted sequence is defined as a region on the template strand of the target gene which is identical to a region on the target antisense RNA transcript to which the antisense strand of an saRNA hybridizes. In Table 6-1, the relative location is the distance from the 5′ end of the targeted sequence to the TSS. A negative number represents a location upstream of the TSS and a positive number represents a location downstream of the TSS.

TABLE 6-1
Sequences of DMD-saRNAs (with no 3′ overhang)

| | | | Genomic Location | |
|---|---|---|---|---|
| | | | of the Targeted | Relative |
| saRNA ID | Target gene | Targeted sequence | sequence | Location |
| DMD.NM_000109- | DMD human | ataggttattggtgtcaaa (SEQ | chrX: 33146045 plus | 500 |
| Pr-1 | | ID NO. 257) | strand | |
| DMD.NM_000109- | DMD human | ctacgtccttagaaattta (SEQ | chrX: 33145863 plus | 682 |
| Pr-7 | | ID NO. 258) | strand | |
| DMD.NM_000109- | DMD human | tgcattatcctataggtta (SEQ | chrX: 33146034 plus | 511 |
| Pr-21 | | ID NO. 259) | strand | |
| DMD.NM_000109- | DMD human | gacatctcctcatgaatat (SEQ | chrX: 32431341 plus | −970 |
| Pr-26 | | ID NO. 260) | strand | |
| DMD.NM_000109- | DMD human | gaatcagctccttgtcaaa (SEQ | chrX: 32430478 plus | −107 |
| Pr-35 | | ID NO. 261) | strand | |
| DMD.NM_000109- | DMD human | ctgtaatcctgctgaacaa (SEQ | chrX: 32430084 plus | 287 |
| Pr-36 | | ID NO. 262) | strand | |
| DMD.NM_004006- | DMD human | gggtcatcgtcatcacaat | chrX: 32430403 plus | −32 |
| Pr-3 | | (SEQ ID NO. 263) | strand | |
| DMD.NM_004006- | DMD human | tgcttccaccagtgagata | chrX: 32430442 plus | −71 |
| Pr-10 | | (SEQ ID NO. 264) | strand | |
| DMD.NM_004006- | DMD human | gtagtaatctgtagagtta | chrX: 31525986 plus | 429 |
| Pr-12 | | (SEQ ID NO. 265) | strand | |
| DMD.NM_004006- | DMD human | cgaagtttggtcaaatata | chrX: 31527327 plus | −912 |
| Pr-23 | | (SEQ ID NO. 266) | strand | |
| DMD.NM_004006- | DMD human | ggattgatctgtgtaacta | chrX: 31526871 plus | −456 |
| Pr-30 | | (SEQ ID NO. 267) | strand | |
| DMD.NM_004006- | DMD human | tgagtagtatctctgagta | chrX: 31527220 plus | −805 |
| Pr-40 | | (SEQ ID NO. 268) | strand | |
| DMD.NM_004009- | DMD human | gcatagcaatcctgagaaa | chrX: 31526392 plus | 23 |
| Pr-14 | | (SEQ ID NO. 269) | strand | |
| DMD.NM_004009- | DMD human | cgtagtaatctgtagagtt | chrX: 31525985 plus | 430 |
| Pr-23 | | (SEQ ID NO. 270) | strand | |
| DMD.NM_004009- | DMD human | gaaagtatttctgagtagt | chrX: 31527209 plus | −794 |
| Pr-25 | | (SEQ ID NO. 271) | strand | |
| DMD.NM_004009- | DMD human | ctgacttgctcttagagat | chrX: 31526798 plus | −383 |
| Pr-27 | | (SEQ ID NO. 272) | strand | |
| DMD.NM_004009- | DMD human | gggattcttgcagaacgaa | chrX: 31527312 plus | −897 |
| Pr-34 | | (SEQ ID NO. 273) | strand | |
| DMD.NM_004009- | DMD human | gcagaaataacatgttaga | chrX: 31526962 plus | −547 |
| Pr-38 | | (SEQ ID NO. 274) | strand | |
| DMD.NM_004012- | DMD human | gggaaatactgaaagtatt | chrX: 31527199 plus | −784 |
| Pr-4 | | (SEQ ID NO. 275) | strand | |
| DMD.NM_004012- | DMD human | ggtttgtactggaaggata | chrX: 31527249 plus | −834 |
| Pr-17 | | (SEQ ID NO. 276) | strand | |
| DMD.NM_004012- | DMD human | gcgaacttcttagaaatga | chrX: 31285627 plus | −603 |
| Pr-24 | | (SEQ ID NO. 277) | strand | |
| DMD.NM_004012- | DMD human | agggaaatgtcagttggaa | chrX: 31284424 plus | 600 |
| Pr-26 | | (SEQ ID NO. 278) | strand | |
| DMD.NM_004012- | DMD human | gatttggatttgtgacata | chrX: 31285556 plus | −532 |
| Pr-36 | | (SEQ ID NO. 279) | strand | |
| DMD.NM_004014- | DMD human | ggtatggactctctaaatt | chrX: 31285715 plus | −691 |
| Pr-1 | | (SEQ ID NO. 280) | strand | |
| DMD.NM_004014- | DMD human | ggaaatgtcagttggaatc | chrX: 31284426 plus | 598 |
| Pr-2 | | (SEQ ID NO. 281) | strand | |
| DMD.NM_004014- | DMD human | acaaactttgcttgaagat | chrX: 31284189 plus | 835 |
| Pr-4 | | (SEQ ID NO. 282) | strand | |
| DMD.NM_004014- | DMD human | gcagtatgatgatagaagt | chrX: 31285878 plus | −854 |
| Pr-10 | | (SEQ ID NO. 283) | strand | |
| DMD.NM_004014- | DMD human | gagtaagagcgacgattta | chrX: 31284529 plus | 495 |
| Pr-12 | | (SEQ ID NO. 284) | strand | |
| DMD.NM_004014- | DMD human | gataaagtttcatggtact | chrX: 32172788 plus | 798 |
| Pr-13 | | (SEQ ID NO. 285) | strand | |
| DMD.NM_004014- | DMD human | tggtttaacttgagagcaa | chrX: 32173213 plus | 373 |
| Pr-15 | | (SEQ ID NO. 286) | strand | |
| DMD.NM_004014- | DMD human | acagtcagcacttgataaa | chrX: 32173917 plus | −331 |
| Pr-20 | | (SEQ ID NO. 287) | strand | |
| DMD.NM_004014- | DMD human | ctgtatagctgatgataaa | chrX: 32174134 plus | −548 |
| Pr-24 | | (SEQ ID NO. 288) | strand | |
| DMD.NM_004014- | DMD human | ggtttaacttgagagcaaa | chrX: 32173214 plus | 372 |
| Pr-26 | | (SEQ ID NO. 289) | strand | |
| DMD.NM_004014- | DMD human | gtcagcacttgataaatat | chrX: 32173920 plus | −334 |
| Pr-27 | | (SEQ ID NO. 290) | strand | |
| DMD.NM_004014- | DMD human | caattgatatcaggttcaa | chrX: 32173959 plus | −373 |
| Pr-37 | | (SEQ ID NO. 291) | strand | |
| DMD.NM_004019- | DMD human | aaagaaatcctgggctgaa | chrX: 32173651 plus | −65 |
| Pr-7 | | (SEQ ID NO. 292) | strand | |
| DMD.NM_004019- | DMD human | gcattacctgatggagatt | chrX: 32173718 plus | −132 |
| Pr-14 | | (SEQ ID NO. 293) | strand | |
| DMD.NM_004019- | DMD human | ataggttattggtgtcaaa | chrX: 33146045 plus | 500 |
| Pr-16 | | (SEQ ID NO. 294) | strand | |
| DMD.NM_004019- | DMD human | ctacgtccttagaaattta | chrX: 33145863 plus | 682 |
| Pr-25 | | (SEQ ID NO. 295) | strand | |
| DMD.NM_004019- | DMD human | tgcattatcctataggtta | chrX: 33146034 plus | 511 |
| Pr-29 | | (SEQ ID NO. 296) | strand | |
| DMD.NM_004019- | DMD human | gacatctcctcatgaatat | chrX: 32431341 plus | −970 |
| Pr-33 | | (SEQ ID NO. 297) | strand | |
| DMD.NM_004019- | DMD human | gaatcagctccttgtcaaa | chrX: 32430478 plus | −107 |
| Pr-39 | | (SEQ ID NO. 298) | strand | |
| DMD.NM_004019- | DMD human | ctgtaatcctgctgaacaa | chrX: 32430084 plus | 287 |
| Pr-40 | | (SEQ ID NO. 299) | strand | |
| DMD.NM_004021- | DMD human | gggtcatcgtcatcacaat | chrX: 32430403 plus | −32 |
| Pr-8 | | (SEQ ID NO. 300) | strand | |
| DMD.NM_004021- | DMD human | tgcttccaccagtgagata | chrX: 32430442 plus | −71 |
| Pr-9 | | (SEQ ID NO. 301) | strand | |
| DMD.NM_004021- | DMD human | gtagtaatctgtagagtta | chrX: 31525986 plus | 429 |
| Pr-15 | | (SEQ ID NO. 302) | strand | |
| DMD.NM_004021- | DMD human | cgaagtttggtcaaatata | chrX: 31527327 plus | −912 |
| Pr-20 | | (SEQ ID NO. 303) | strand | |
| DMD.NM_004021- | DMD human | ggattgatctgtgtaacta | chrX: 31526871 plus | −456 |
| Pr-23 | | (SEQ ID NO. 304) | strand | |
| DMD.NM_004021- | DMD human | tgagtagtatctctgagta | chrX: 31527220 plus | −805 |
| Pr-26 | | (SEQ ID NO. 305) | strand | |
| DMD.NM_004021- | DMD human | gcatagcaatcctgagaaa | chrX: 31526392 plus | 23 |
| Pr-27 | | (SEQ ID NO. 306) | strand | |
| DMD.NM_004021- | DMD human | cgtagtaatctgtagagtt | chrX: 31525985 plus | 430 |
| Pr-31 | | (SEQ ID NO. 307) | strand | |
| DMD.NM_004021- | DMD human | gaaagtatttctgagtagt (SEQ | chrX: 31527209 plus | −794 |
| Pr-32 | | ID NO. 308) | strand | |

TABLE 6-2
Sequences of DMD-saRNAs (with no 3′ overhang)

| saRNA ID | Sense (passenger) | Antisense (guide) |
|---|---|---|
| DMD.NM_000109-Pr-1 | AUAGGUUAUUGGUGUCAAA | UUUGACACCAAUAACCUAU |
| | (SEQ ID NO. 309) | (SEQ ID NO. 310) |
| DMD.NM_000109-Pr-7 | CUACGUCCUUAGAAAUUUA | UAAAUUUCUAAGGACGUAG |
| | (SEQ ID NO. 311) | (SEQ ID NO. 312) |
| DMD.NM_000109-Pr-21 | UGCAUUAUCCUAUAGGUUA | UAACCUAUAGGAUAAUGCA |
| | (SEQ ID NO. 313) | (SEQ ID NO. 314) |
| DMD.NM_000109-Pr-26 | GACAUCUCCUCAUGAAUAU | AUAUUCAUGAGGAGAUGUC |
| | (SEQ ID NO. 315) | (SEQ ID NO. 316) |
| DMD.NM_000109-Pr-35 | GAAUCAGCUCCUUGUCAAA | UUUGACAAGGAGCUGAUUC |
| | (SEQ ID NO. 317) | (SEQ ID NO. 318) |
| DMD.NM_000109-Pr-36 | CUGUAAUCCUGCUGAACAA | UUGUUCAGCAGGAUUACAG |
| | (SEQ ID NO. 319) | (SEQ ID NO. 320) |
| DMD.NM_004006-Pr-3 | GGGUCAUCGUCAUCACAAU | AUUGUGAUGACGAUGACCC |
| | (SEQ ID NO. 321) | (SEQ ID NO. 322) |
| DMD.NM_004006-Pr-10 | UGCUUCCACCAGUGAGAUA | UAUCUCACUGGUGGAAGCA |
| | (SEQ ID NO. 323) | (SEQ ID NO. 324) |
| DMD.NM_004006-Pr-12 | GUAGUAAUCUGUAGAGUUA | UAACUCUACAGAUUACUAC |
| | (SEQ ID NO. 325) | (SEQ ID NO. 326) |
| DMD.NM_004006-Pr-23 | CGAAGUUUGGUCAAAUAUA | UAUAUUUGACCAAACUUCG |
| | (SEQ ID NO. 327) | (SEQ ID NO. 328) |
| DMD.NM_004006-Pr-30 | GGAUUGAUCUGUGUAACUA | UAGUUACACAGAUCAAUCC |
| | (SEQ ID NO. 329) | (SEQ ID NO. 330) |
| DMD.NM_004006-Pr-40 | UGAGUAGUAUCUCUGAGUA | UACUCAGAGAUACUACUCA |
| | (SEQ ID NO. 331) | (SEQ ID NO. 332) |
| DMD.NM_004009-Pr-14 | GCAUAGCAAUCCUGAGAAA | UUUCUCAGGAUUGCUAUGC |
| | (SEQ ID NO. 333) | (SEQ ID NO. 334) |
| DMD.NM_004009-Pr-23 | CGUAGUAAUCUGUAGAGUU | AACUCUACAGAUUACUACG |
| | (SEQ ID NO. 335) | (SEQ ID NO. 336) |
| DMD.NM_004009-Pr-25 | GAAAGUAUUUCUGAGUAGU | ACUACUCAGAAAUACUUUC |
| | (SEQ ID NO. 337) | (SEQ ID NO. 338) |
| DMD.NM_004009-Pr-27 | CUGACUUGCUCUUAGAGAU | AUCUCUAAGAGCAAGUCAG |
| | (SEQ ID NO. 339) | (SEQ ID NO. 340) |
| DMD.NM_004009-Pr-34 | GGGAUUCUUGCAGAACGAA | UUCGUUCUGCAAGAAUCCC |
| | (SEQ ID NO. 341) | (SEQ ID NO. 342) |
| DMD.NM_004009-Pr-38 | GCAGAAAUAACAUGUUAGA | UCUAACAUGUUAUUUCUGC |
| | (SEQ ID NO. 343) | (SEQ ID NO. 344) |
| DMD.NM_004012-Pr-4 | GGGAAAUACUGAAAGUAUU | AAUACUUUCAGUAUUUCCC |
| | (SEQ ID NO. 345) | (SEQ ID NO. 346) |
| DMD.NM_004012-Pr-17 | GGUUUGUACUGGAAGGAUA | UAUCCUUCCAGUACAAACC |
| | (SEQ ID NO. 347) | (SEQ ID NO. 348) |
| DMD.NM_004012-Pr-24 | GCGAACUUCUUAGAAAUGA | UCAUUUCUAAGAAGUUCGC |
| | (SEQ ID NO. 349) | (SEQ ID NO. 350) |
| DMD.NM_004012-Pr-26 | AGGGAAAUGUCAGUUGGAA | UUCCAACUGACAUUUCCCU |
| | (SEQ ID NO. 351) | (SEQ ID NO. 352) |
| DMD.NM_004012-Pr-36 | GAUUUGGAUUUGUGACAUA | UAUGUCACAAAUCCAAAUC |
| | (SEQ ID NO. 353) | (SEQ ID NO. 354) |
| DMD.NM_004014-Pr-1 | GGUAUGGACUCUCUAAAUU | AAUUUAGAGAGUCCAUACC |
| | (SEQ ID NO. 355) | (SEQ ID NO. 356) |
| DMD.NM_004014-Pr-2 | GGAAAUGUCAGUUGGAAUC | GAUUCCAACUGACAUUUCC |
| | (SEQ ID NO. 357) | (SEQ ID NO. 358) |
| DMD.NM_004014-Pr-4 | ACAAACUUUGCUUGAAGAU | AUCUUCAAGCAAAGUUUGU |
| | (SEQ ID NO. 359) | (SEQ ID NO. 360) |
| DMD.NM_004014-Pr-10 | GCAGUAUGAUGAUAGAAGU | ACUUCUAUCAUCAUACUGC |
| | (SEQ ID NO. 361) | (SEQ ID NO. 362) |
| DMD.NM_004014-Pr-12 | GAGUAAGAGCGACGAUUUA | UAAAUCGUCGCUCUUACUC |
| | (SEQ ID NO. 363) | (SEQ ID NO. 364) |
| DMD.NM_004014-Pr-13 | GAUAAAGUUUCAUGGUACU | AGUACCAUGAAACUUUAUC |
| | (SEQ ID NO. 365) | (SEQ ID NO. 366) |
| DMD.NM_004014-Pr-15 | UGGUUUAACUUGAGAGCAA | UUGCUCUCAAGUUAAACCA |
| | (SEQ ID NO. 367) | (SEQ ID NO. 368) |
| DMD.NM_004014-Pr-20 | ACAGUCAGCACUUGAUAAA | UUUAUCAAGUGCUGACUGU |
| | (SEQ ID NO. 369) | (SEQ ID NO. 370) |
| DMD.NM_004014-Pr-24 | CUGUAUAGCUGAUGAUAAA | UUUAUCAUCAGCUAUACAG |
| | (SEQ ID NO. 371) | (SEQ ID NO. 372) |
| DMD.NM_004014-Pr-26 | GGUUUAACUUGAGAGCAAA | UUUGCUCUCAAGUUAAACC |
| | (SEQ ID NO. 373) | (SEQ ID NO. 374) |
| DMD.NM_004014-Pr-27 | GUCAGCACUUGAUAAAUAU | AUAUUUAUCAAGUGCUGAC |
| | (SEQ ID NO. 375) | (SEQ ID NO. 376) |
| DMD.NM_004014-Pr-37 | CAAUUGAUAUCAGGUUCAA | UUGAACCUGAUAUCAAUUG |
| | (SEQ ID NO. 377) | (SEQ ID NO. 378) |
| DMD.NM_004019-Pr-7 | AAAGAAAUCCUGGGCUGAA | UUCAGCCCAGGAUUUCUUU |
| | (SEQ ID NO. 379) | (SEQ ID NO. 380) |
| DMD.NM_004019-Pr-14 | GCAUUACCUGAUGGAGAUU | AAUCUCCAUCAGGUAAUGC |
| | (SEQ ID NO. 381) | (SEQ ID NO. 382) |
| DMD.NM_004019-Pr-16 | AUAGGUUAUUGGUGUCAAA | UUUGACACCAAUAACCUAU |
| | (SEQ ID NO. 383) | (SEQ ID NO. 384) |
| DMD.NM_004019-Pr-25 | CUACGUCCUUAGAAAUUUA | UAAAUUUCUAAGGACGUAG |
| | (SEQ ID NO. 385) | (SEQ ID NO. 386) |
| DMD.NM_004019-Pr-29 | UGCAUUAUCCUAUAGGUUA | UAACCUAUAGGAUAAUGCA |
| | (SEQ ID NO. 387) | (SEQ ID NO. 388) |
| DMD.NM_004019-Pr-33 | GACAUCUCCUCAUGAAUAU | AUAUUCAUGAGGAGAUGUC |
| | (SEQ ID NO. 389) | (SEQ ID NO. 390) |
| DMD.NM_004019-Pr-39 | GAAUCAGCUCCUUGUCAAA | UUUGACAAGGAGCUGAUUC |
| | (SEQ ID NO. 391) | (SEQ ID NO. 392) |
| DMD.NM_004019-Pr-40 | CUGUAAUCCUGCUGAACAA | UUGUUCAGCAGGAUUACAG |
| | (SEQ ID NO. 393) | (SEQ ID NO. 394) |
| DMD.NM_004021-Pr-8 | GGGUCAUCGUCAUCACAAU | AUUGUGAUGACGAUGACCC |
| | (SEQ ID NO. 395) | (SEQ ID NO. 396) |
| DMD.NM_004021-Pr-9 | UGCUUCCACCAGUGAGAUA | UAUCUCACUGGUGGAAGCA |
| | (SEQ ID NO. 397) | (SEQ ID NO. 398) |
| DMD.NM_004021-Pr-15 | GUAGUAAUCUGUAGAGUUA | UAACUCUACAGAUUACUAC |
| | (SEQ ID NO. 399) | (SEQ ID NO. 400) |
| DMD.NM_004021-Pr-20 | CGAAGUUUGGUCAAAUAUA | UAUAUUUGACCAAACUUCG |
| | (SEQ ID NO. 401) | (SEQ ID NO. 402) |
| DMD.NM_004021-Pr-23 | GGAUUGAUCUGUGUAACUA | UAGUUACACAGAUCAAUCC |
| | (SEQ ID NO. 403) | (SEQ ID NO. 404) |
| DMD.NM_004021-Pr-26 | UGAGUAGUAUCUCUGAGUA | UACUCAGAGAUACUACUCA |
| | (SEQ ID NO. 405) | (SEQ ID NO. 406) |
| DMD.NM_004021-Pr-27 | GCAUAGCAAUCCUGAGAAA | UUUCUCAGGAUUGCUAUGC |
| | (SEQ ID NO. 407) | (SEQ ID NO. 408) |
| DMD.NM_004021-Pr-31 | CGUAGUAAUCUGUAGAGUU | AACUCUACAGAUUACUACG |
| | (SEQ ID NO. 409) | (SEQ ID NO. 410) |
| DMD.NM_004021-Pr-32 | GAAAGUAUUUCUGAGUAGU | ACUACUCAGAAAUACUUUC |
| | (SEQ ID NO. 411) | (SEQ ID NO. 412) |

TABLE 7
Sequences of DMD-saRNAs (with 3′ overhang)

| saRNA ID | Sense (passenger) | Antisense (guide) |
|---|---|---|
| DMD.NM_000109- | AUAGGUUAUUGGUGUCAAAUU (SEQ | UUUGACACCAAUAACCUAUUU |
| Pr-1′ | ID NO. 413) | (SEQ ID NO. 414) |
| DMD.NM_000109- | CUACGUCCUUAGAAAUUUAUU (SEQ | UAAAUUUCUAAGGACGUAGUU |
| Pr-7′ | ID NO. 415) | (SEQ ID NO. 416) |
| DMD.NM_000109- | UGCAUUAUCCUAUAGGUUAUU (SEQ | UAACCUAUAGGAUAAUGCAUU |
| Pr-21′ | ID NO. 417) | (SEQ ID NO. 418) |
| DMD.NM_000109- | GACAUCUCCUCAUGAAUAUUU (SEQ | AUAUUCAUGAGGAGAUGUCUU |
| Pr-26′ | ID NO. 419) | (SEQ ID NO. 420) |
| DMD.NM_000109- | GAAUCAGCUCCUUGUCAAAUU (SEQ | UUUGACAAGGAGCUGAUUCUU |
| Pr-35′ | ID NO. 421) | (SEQ ID NO. 422) |
| DMD.NM_000109- | CUGUAAUCCUGCUGAACAAUU (SEQ | UUGUUCAGCAGGAUUACAGUU |
| Pr-36′ | ID NO. 423) | (SEQ ID NO. 424) |
| DMD.NM_004006- | GGGUCAUCGUCAUCACAAUUU (SEQ | AUUGUGAUGACGAUGACCCUU |
| Pr-3′ | ID NO. 425) | (SEQ ID NO. 426) |
| DMD.NM_004006- | UGCUUCCACCAGUGAGAUAUU (SEQ | UAUCUCACUGGUGGAAGCAUU |
| Pr-10′ | ID NO. 427) | (SEQ ID NO. 428) |
| DMD.NM_004006- | GUAGUAAUCUGUAGAGUUAUU (SEQ | UAACUCUACAGAUUACUACUU |
| Pr-12′ | ID NO. 429) | (SEQ ID NO. 430) |
| DMD.NM_004006- | CGAAGUUUGGUCAAAUAUAUU (SEQ | UAUAUUUGACCAAACUUCGUU |
| Pr-23′ | ID NO. 431) | (SEQ ID NO. 432) |
| DMD.NM_004006- | GGAUUGAUCUGUGUAACUAUU (SEQ | UAGUUACACAGAUCAAUCCUU |
| Pr-30′ | ID NO. 433) | (SEQ ID NO. 434) |
| DMD.NM_004006- | UGAGUAGUAUCUCUGAGUAUU (SEQ | UACUCAGAGAUACUACUCAUU |
| Pr-40′ | ID NO. 435) | (SEQ ID NO. 436) |
| DMD.NM_004009- | GCAUAGCAAUCCUGAGAAAUU (SEQ | UUUCUCAGGAUUGCUAUGCUU |
| Pr-14′ | ID NO. 437) | (SEQ ID NO. 438) |
| DMD.NM_004009- | CGUAGUAAUCUGUAGAGUUUU (SEQ | AACUCUACAGAUUACUACGUU |
| Pr-23′ | ID NO. 439) | (SEQ ID NO. 440) |
| DMD.NM_004009- | GAAAGUAUUUCUGAGUAGUUU (SEQ | ACUACUCAGAAAUACUUUCUU |
| Pr-25′ | ID NO. 441) | (SEQ ID NO. 442) |
| DMD.NM_004009- | CUGACUUGCUCUUAGAGAUUU (SEQ | AUCUCUAAGAGCAAGUCAGUU |
| Pr-27′ | ID NO. 443) | (SEQ ID NO. 444) |
| DMD.NM_004009- | GGGAUUCUUGCAGAACGAAUU (SEQ | UUCGUUCUGCAAGAAUCCCUU |
| Pr-34′ | ID NO. 445) | (SEQ ID NO. 446) |
| DMD.NM_004009- | GCAGAAAUAACAUGUUAGAUU (SEQ | UCUAACAUGUUAUUUCUGCUU |
| Pr-38′ | ID NO. 447) | (SEQ ID NO. 448) |
| DMD.NM_004012- | GGGAAAUACUGAAAGUAUUUU (SEQ | AAUACUUUCAGUAUUUCCCUU |
| Pr-4′ | ID NO. 449) | (SEQ ID NO. 450) |
| DMD.NM_004012- | GGUUUGUACUGGAAGGAUAUU (SEQ | UAUCCUUCCAGUACAAACCUU |
| Pr-17′ | ID NO. 451) | (SEQ ID NO. 452) |
| DMD.NM_004012- | GCGAACUUCUUAGAAAUGAUU (SEQ | UCAUUUCUAAGAAGUUCGCUU |
| Pr-24′ | ID NO. 453) | (SEQ ID NO. 454) |
| DMD.NM_004012- | AGGGAAAUGUCAGUUGGAAUU (SEQ | UUCCAACUGACAUUUCCCUUU |
| Pr-26′ | ID NO. 455) | (SEQ ID NO. 456) |
| DMD.NM_004012- | GAUUUGGAUUUGUGACAUAUU (SEQ | UAUGUCACAAAUCCAAAUCUU |
| Pr-36′ | ID NO. 457) | (SEQ ID NO. 458) |
| DMD.NM_004014- | GGUAUGGACUCUCUAAAUUUU (SEQ | AAUUUAGAGAGUCCAUACCUU |
| Pr-1′ | ID NO. 459) | (SEQ ID NO. 460) |
| DMD.NM_004014- | GGAAAUGUCAGUUGGAAUCUU (SEQ | GAUUCCAACUGACAUUUCCUU |
| Pr-2′ | ID NO. 461) | (SEQ ID NO. 462) |
| DMD.NM_004014- | ACAAACUUUGCUUGAAGAUUU (SEQ | AUCUUCAAGCAAAGUUUGUUU |
| Pr-4′ | ID NO. 463) | (SEQ ID NO. 464) |
| DMD.NM_004014- | GCAGUAUGAUGAUAGAAGUUU (SEQ | ACUUCUAUCAUCAUACUGCUU |
| Pr-10′ | ID NO. 465) | (SEQ ID NO. 466) |
| DMD.NM_004014- | GAGUAAGAGCGACGAUUUAUU (SEQ | UAAAUCGUCGCUCUUACUCUU |
| Pr-12′ | ID NO. 467) | (SEQ ID NO. 468) |
| DMD.NM_004014- | GAUAAAGUUUCAUGGUACUUU (SEQ | AGUACCAUGAAACUUUAUCUU |
| Pr-13′ | ID NO. 469) | (SEQ ID NO. 470) |
| DMD.NM_004014- | UGGUUUAACUUGAGAGCAAUU (SEQ | UUGCUCUCAAGUUAAACCAUU |
| Pr-15′ | ID NO. 471) | (SEQ ID NO. 472) |
| DMD.NM_004014- | ACAGUCAGCACUUGAUAAAUU (SEQ | UUUAUCAAGUGCUGACUGUUU |
| Pr-20′ | ID NO. 473) | (SEQ ID NO. 474) |
| DMD.NM_004014- | CUGUAUAGCUGAUGAUAAAUU (SEQ | UUUAUCAUCAGCUAUACAGUU |
| Pr-24′ | ID NO. 475) | (SEQ ID NO. 476) |
| DMD.NM_004014- | GGUUUAACUUGAGAGCAAAUU (SEQ | UUUGCUCUCAAGUUAAACCUU |
| Pr-26′ | ID NO. 477) | (SEQ ID NO. 478) |
| DMD.NM_004014- | GUCAGCACUUGAUAAAUAUUU (SEQ | AUAUUUAUCAAGUGCUGACUU |
| Pr-27′ | ID NO. 479) | (SEQ ID NO. 480) |
| DMD.NM_004014- | CAAUUGAUAUCAGGUUCAAUU (SEQ | UUGAACCUGAUAUCAAUUGUU |
| Pr-37′ | ID NO. 481) | (SEQ ID NO. 482) |
| DMD.NM_004019- | AAAGAAAUCCUGGGCUGAAUU (SEQ | UUCAGCCCAGGAUUUCUUUUU |
| Pr-7′ | ID NO. 483) | (SEQ ID NO. 484) |
| DMD.NM_004019- | GCAUUACCUGAUGGAGAUUUU (SEQ | AAUCUCCAUCAGGUAAUGCUU |
| Pr-14′ | ID NO. 485) | (SEQ ID NO. 486) |
| DMD.NM_004019- | AUAGGUUAUUGGUGUCAAAUU (SEQ | UUUGACACCAAUAACCUAUUU |
| Pr-16′ | ID NO. 487) | (SEQ ID NO. 488) |
| DMD.NM_004019- | CUACGUCCUUAGAAAUUUAUU (SEQ | UAAAUUUCUAAGGACGUAGUU |
| Pr-25′ | ID NO. 489) | (SEQ ID NO. 490) |
| DMD.NM_004019- | UGCAUUAUCCUAUAGGUUAUU (SEQ | UAACCUAUAGGAUAAUGCAUU |
| Pr-29′ | ID NO. 491) | (SEQ ID NO. 492) |
| DMD.NM_004019- | GACAUCUCCUCAUGAAUAUUU (SEQ | AUAUUCAUGAGGAGAUGUCUU |
| Pr-33′ | ID NO. 493) | (SEQ ID NO. 494) |
| DMD.NM_004019- | GAAUCAGCUCCUUGUCAAAUU (SEQ | UUUGACAAGGAGCUGAUUCUU |
| Pr-39′ | ID NO. 495) | (SEQ ID NO. 496) |
| DMD.NM_004019- | CUGUAAUCCUGCUGAACAAUU (SEQ | UUGUUCAGCAGGAUUACAGUU |
| Pr-40′ | ID NO. 497) | (SEQ ID NO. 498) |
| DMD.NM_004021- | GGGUCAUCGUCAUCACAAUUU (SEQ | AUUGUGAUGACGAUGACCCUU |
| Pr-8′ | ID NO. 499) | (SEQ ID NO. 500) |
| DMD.NM_004021- | UGCUUCCACCAGUGAGAUAUU (SEQ | UAUCUCACUGGUGGAAGCAUU |
| Pr-9′ | ID NO. 501) | (SEQ ID NO. 502) |
| DMD.NM_004021- | GUAGUAAUCUGUAGAGUUAUU (SEQ | UAACUCUACAGAUUACUACUU |
| Pr-15′ | ID NO. 503) | (SEQ ID NO. 504) |
| DMD.NM_004021- | CGAAGUUUGGUCAAAUAUAUU (SEQ | UAUAUUUGACCAAACUUCGUU |
| Pr-20′ | ID NO. 505) | (SEQ ID NO. 506) |
| DMD.NM_004021- | GGAUUGAUCUGUGUAACUAUU (SEQ | UAGUUACACAGAUCAAUCCUU |
| Pr-23′ | ID NO. 507) | (SEQ ID NO. 508) |
| DMD.NM_004021- | UGAGUAGUAUCUCUGAGUAUU (SEQ | UACUCAGAGAUACUACUCAUU |
| Pr-26′ | ID NO. 509) | (SEQ ID NO. 510) |
| DMD.NM_004021- | GCAUAGCAAUCCUGAGAAAUU (SEQ | UUUCUCAGGAUUGCUAUGCUU |
| Pr-27′ | ID NO. 511) | (SEQ ID NO. 512) |
| DMD.NM_004021- | CGUAGUAAUCUGUAGAGUUUU (SEQ | AACUCUACAGAUUACUACGUU |
| Pr-31′ | ID NO. 513) | (SEQ ID NO. 514) |
| DMD.NM_004021- | GAAAGUAUUUCUGAGUAGUUU (SEQ | ACUACUCAGAAAUACUUUCUU |
| Pr-32′ | ID NO. 515) | (SEQ ID NO. 516) |

[0287] DMD gene encodes a protein called dystrophin. This protein is located primarily in muscles used for movement (skeletal muscles) and in heart (cardiac) muscle. Small amounts of dystrophin are present in nerve cells in the brain. In skeletal and cardiac muscles, dystrophin is part of a group of proteins (a protein complex) that work together to strengthen muscle fibers and protect them from injury as muscles contract and relax. The dystrophin complex acts as an anchor, connecting each muscle cell's structural framework (cytoskeleton) with the lattice of proteins and other molecules outside the cell (extracellular matrix). The dystrophin complex may also play a role in cell signaling by interacting with proteins that send and receive chemical signals. Research also suggests that dystrophin is important for the normal structure and function of synapses, which are specialized connections between nerve cells where cell-to-cell communication occurs. Mutations in DMD gene cause diseases such as a heart disease called DMD-associated dilated cardiomyopathy and Duchenne and Becker muscular dystrophy (Bovolenta et al., PLoS One, vol. 7(9):e45328 (2012); Narayanan et al., PLoS One, vol. 8(6):e67237 (2013), the contents of each of which are incorporated herein by reference in their entirety). Patients with DMD-associated dilated cardiomyopathy have little or no functional dystrophin in the heart and reduced amounts of dystrophin in skeletal muscle cells. The cardiac muscle is enlarged and weakened, preventing the heart from pumping blood efficiently. Duchenne and Becker muscular dystrophy are characterized by progressive muscle weakness and wasting (atrophy). Skeletal and cardiac muscle cells without enough functional dystrophin become damaged as the muscles repeatedly contract and relax with use. The damaged cells weaken and die over time, causing the characteristic muscle weakness and heart problems seen in Duchenne and Becker muscular dystrophy.

[0288] In one embodiment, provided is a method of modulating dystrophin protein levels comprising administering DMD-saRNA of the present invention, wherein the DMD-saRNA targets an antisense RNA transcript of DMD gene. The dystrophin protein levels may be dystrophin protein levels in skeletal muscle cells or in cardiac muscle cells. In one embodiment, dystrophin protein level is increased by at least 20, 30, 40%, or at least 45, 50, 55, 60, 65, 70, 75%, or at least 80% in the presence of the DMD-saRNA of the present invention compared to dystrophin protein level in the absence of the DMD-saRNA of the present invention. In a further embodiment, dystrophin protein level is increased by a factor of at least 2, 3, 4, 5, 6, 7, 8, 9, 10, or by a factor of at least 15, 20, 25, 30, 35, 40, 45, 50, or by a factor of at least 60, 70, 80, 90, 100, in the presence of the DMD-saRNA of the present invention compared to dystrophin protein level in the absence of the DMD-saRNA of the present invention.

[0289] In another embodiment, provided is a method of treating DMD-associated dilated cardiomyopathy or Duchenne and Becker muscular dystrophy comprising administering DMD-saRNA of the present invention, wherein the DMD-saRNA targets an antisense RNA transcript of DMD gene, and wherein the symptoms of DMD-associated dilated cardiomyopathy or Duchenne and Becker muscular dystrophy are reduced.

[0290] In one embodiment, the DMD-saRNA of the present invention is an antisense sequence such as, but not limited to, SEQ ID NO: 310, 312, 314, 316, 318, 320, 322, 324, 326, 328, 330, 332, 334, 336, 338, 340, 342, 344, 346, 348, 350, 352, 354, 356, 358, 360, 362, 364, 366, 368, 370, 372, 374, 376, 378, 380, 382, 384, 386, 388, 390, 392, 394, 396, 398, 400, 402, 404, 406, 408, 410, 412, 414, 416, 418, 420, 422, 424, 426, 428, 430, 432, 434, 436, 438, 440, 442, 444, 446, 448, 450, 452, 454, 456, 458, 460, 462, 464, 466, 468, 470, 472, 474, 476, 478, 480, 482, 484, 486, 488, 490, 492, 494, 496, 498, 500, 502, 504, 506, 508, 510, 512, 514, 516, 2362, 2364, 2366, 2368, 2370, 2372, 2374, 2376, 2378, 2380, 2382, 2384, 2386, 2388, 2390, 2392, 2394, 2396, 2398, 2400, 2402, 2404, 2406, 2408, 2410, 2412, 2414, 2416, 2418, 2420, 2422, 2424, 2426, 2428, 2430, 2432, 2434, 2436, 2438, 2440, 2442, 2444, 2446, 2448, 2450, 2452, 2454, 2456, 2458, 2460, 2462, 2464, 2466, 2468, 2470, 2472, 2474, 2476, 2478, 2480, 2482, 2484, 2486, 2488, 2490, 2492, 2494, 2496, 2498, 2500, 2502, 2504, 2506, 2508, 2510, 2512, 2514, 2516, 2518, 2520, 2522, 2524, 2526, 2528, 2530, 2532, 2534, 2536, 2538, 2540, 2542, 2544, 2546, 2548, 2550, 2552, 2554, 2556, 2558, 2560, 2562, 2564, 2566, 2568, 2570, 2572, 2574, 2576, 2578, 2580, 2582, 2584, 2586, 2588, 2590, 2592, 2594, 2596, 2598, 2600, 2602, 2604, 2606, 2608, 2610, 2612, 2614, 2616, 2618,2620, 2622, 2624, 2626, 2628, 2630, 2632, 2634, 2636, 2638, 2640, 2642, 2644, 2646, 2648, 2650, 2652, 2654, 2656, 2658, 2660, 2662, 2664, 2666, 2668, 2670, 2672, 2674, 2676, 2678, 2680, 2682, 2684, 2686, 2688, 2690, 2692, 2694, 2696, 2698, 2700, 2702, 2704, 2706, 2708, 2710, 2712, 2714, 2716, 2718,2720, 2722, 2724, 2726, 2728, 2730, 2732, 2734, 2736, 2738, 2740, 2742, 2744, 2746, 2748, 2750, 2752, 2754, 2756, 2758, 2760, 2762, 2764, 2766, 2768, 2770, 2772, 2774, 2776, 2778, 2780, 2782, 2784, 2786, 2788, 2790, 2792, 2794, 2796, 2798, 2800, 2802, 2804, 2806, 2808, 2810, 2812, 2814, 2816, 2818,2820, 2822, 2824, 2826, 2828, 2830, 2832, 2834, 2836, 2838, 2840, 2842, 2844, 2846, 2848, 2850, 2852, 2854, 2856, 2858, 2860, 2862, 2864, 2866, 2868, 2870, 2872, 2874, 2876, 2878, 2880, 2882, 2884, 2886, 2888, 2890, 2892, 2894, 2896, 2898, 2900, 2902, 2904, 2906, 2908, 2910, 2912, 2914, 2916, 2918,2920, 2922, 2924, 2926, 2928, 2930, 2932, 2934, 2936, 2938, 2940, 2942, 2944, 2946, 2948, 2950, 2952, 2954, 2956, 2958, 2960, 2962, 2964, 2966, 2968, 2970, 2972, 2974, 2976, 2978, 2980, 2982, 2984, 2986, 2988, 2990, 2992, 2994, 2996, 2998, 3000, 3002, 3004, 3006, 3008, 3010, 3012, 3014, 3016, 3018, 3020, 3022, 3024, 3026, 3028, 3030, 3032, 3034, 3036, 3038, 3040, 3042, 3044, 3046, 3048, 3050, 3052, 3054, 3056, 3058, 3060, 3062, 3064, 3066, 3068, 3070, 3072, 3074, 3076, 3078, 3080, 3082, 3084, 3086, 3088, 3090, 3092, 3094, 3096, 3098, 3100, 3102, 3104, 3106, 3108, 3110, 3112, 3114, 3116, 3118, 3120, 3122, 3124, 3126, 3128, 3130, 3132, 3134, 3136 and 3138. As a non-limiting example, the DMD-saRNA may be used to modulate dystrophin proteins levels and/or treat DMD-associated dilated cardiomyopathy or Duchenne and Becker muscular dystrophy.

[0291] In one embodiment, the DMD-saRNA of the present invention is an saRNA duplex. The saRNA duplex may be a pair of sense and antisense sequences such as, but not limited to, SEQ ID NOs: 309 and 310; SEQ ID NOs: 311 and 312; SEQ ID NOs: 313 and 314; SEQ ID NOs: 315 and 316; SEQ ID NOs: 317 and 318; SEQ ID NOs: 319 and 320; SEQ ID NOs: 321 and 322; SEQ ID NOs: 323 and 324; SEQ ID NOs: 325 and 326; SEQ ID NOs: 327 and 328; SEQ ID NOs: 329 and 330; SEQ ID NOs: 331 and 332; SEQ ID NOs: 333 and 334; SEQ ID NOs: 335 and 336; SEQ ID NOs: 337 and 338; SEQ ID NOs: 339 and 340; SEQ ID NOs: 341 and 342; SEQ ID NOs: 343 and 344; SEQ ID NOs: 345 and 346; SEQ ID NOs: 347 and 348; SEQ ID NOs: 349 and 350; SEQ ID NOs: 351 and 352; SEQ ID NOs: 353 and 354; SEQ ID NOs: 355 and 356; SEQ ID NOs: 357 and 358; SEQ ID NOs: 359 and 360; SEQ ID NOs: 361 and 362; SEQ ID NOs: 363 and 364; SEQ ID NOs: 365 and 366; SEQ ID NOs: 367 and 368; SEQ ID NOs: 369 and 370; SEQ ID NOs: 371 and 372; SEQ ID NOs: 373 and 374; SEQ ID NOs: 375 and 376; SEQ ID NOs: 377 and 378; SEQ ID NOs: 379 and 380; SEQ ID NOs: 381 and 382; SEQ ID NOs: 383 and 384; SEQ ID NOs: 385 and 386; SEQ ID NOs: 387 and 388; SEQ ID NOs: 389 and 390; SEQ ID NOs: 391 and 392; SEQ ID NOs: 393 and 394; SEQ ID NOs: 395 and 396; SEQ ID NOs: 397 and 398; SEQ ID NOs: 399 and 400; SEQ ID NOs: 401 and 402; SEQ ID NOs: 403 and 404; SEQ ID NOs: 405 and 406; SEQ ID NOs: 407 and 408; SEQ ID NOs: 409 and 410; SEQ ID NOs: 411 and 412; SEQ ID NOs: 413 and 414; SEQ ID NOs: 415 and 416; SEQ ID NOs: 417 and 418; SEQ ID NOs: 419 and 420; SEQ ID NOs: 421 and 422; SEQ ID NOs: 423 and 424; SEQ ID NOs: 425 and 426; SEQ ID NOs: 427 and 428; SEQ ID NOs: 429 and 430; SEQ ID NOs: 431 and 432; SEQ ID NOs: 433 and 434; SEQ ID NOs: 435 and 436; SEQ ID NOs: 437 and 438; SEQ ID NOs: 439 and 440; SEQ ID NOs: 441 and 442; SEQ ID NOs: 443 and 444; SEQ ID NOs: 445 and 446; SEQ ID NOs: 447 and 448; SEQ ID NOs: 449 and 450; SEQ ID NOs: 451 and 452; SEQ ID NOs: 453 and 454; SEQ ID NOs: 455 and 456; SEQ ID NOs: 457 and 458; SEQ ID NOs: 459 and 460; SEQ ID NOs: 461 and 462; SEQ ID NOs: 463 and 464; SEQ ID NOs: 465 and 466; SEQ ID NOs: 467 and 468; SEQ ID NOs: 469 and 470; SEQ ID NOs: 471 and 472; SEQ ID NOs: 473 and 474; SEQ ID NOs: 475 and 476; SEQ ID NOs: 477 and 478; SEQ ID NOs: 479 and 480; SEQ ID NOs: 481 and 482; SEQ ID NOs: 483 and 484; SEQ ID NOs: 485 and 486; SEQ ID NOs: 487 and 488; SEQ ID NOs: 489 and 490; SEQ ID NOs: 491 and 492; SEQ ID NOs: 493 and 494; SEQ ID NOs: 495 and 496; SEQ ID NOs: 497 and 498; SEQ ID NOs: 499 and 500; SEQ ID NOs: 501 and 502; SEQ ID NOs: 503 and 504; SEQ ID NOs: 505 and 506; SEQ ID NOs: 507 and 508; SEQ ID NOs: 509 and 510; SEQ ID NOs: 511 and 512; SEQ ID NOs: 513 and 514; SEQ ID NOs: 515 and 516; SEQ ID NOs: 2361 and 2362; SEQ ID NOs: 2363 and 2364; SEQ ID NOs: 2365 and 2366; SEQ ID NOs: 2367 and 2368; SEQ ID NOs: 2369 and 2370; SEQ ID NOs: 2371 and 2372; SEQ ID NOs: 2373 and 2374; SEQ ID NOs: 2375 and 2376; SEQ ID NOs: 2377 and 2378; SEQ ID NOs: 2379 and 2380; SEQ ID NOs: 2381 and 2382; SEQ ID NOs: 2383 and 2384; SEQ ID NOs: 2385 and 2386; SEQ ID NOs: 2387 and 2388; SEQ ID NOs: 2389 and 2390; SEQ ID NOs: 2391 and 2392; SEQ ID NOs: 2393 and 2394; SEQ ID NOs: 2395 and 2396; SEQ ID NOs: 2397 and 2398; SEQ ID NOs: 2399 and 2400; SEQ ID NOs: 2401 and 2402; SEQ ID NOs: 2403 and 2404; SEQ ID NOs: 2405 and 2406; SEQ ID NOs: 2407 and 2408; SEQ ID NOs: 2409 and 2410; SEQ ID NOs: 2411 and 2412; SEQ ID NOs: 2413 and 2414; SEQ ID NOs: 2415 and 2416; SEQ ID NOs: 2417 and 2418; SEQ ID NOs: 2419 and 2420; SEQ ID NOs: 2421 and 2422; SEQ ID NOs: 2423 and 2424; SEQ ID NOs: 2425 and 2426; SEQ ID NOs: 2427 and 2428; SEQ ID NOs: 2429 and 2430; SEQ ID NOs: 2431 and 2432; SEQ ID NOs: 2433 and 2434; SEQ ID NOs: 2435 and 2436; SEQ ID NOs: 2437 and 2438; SEQ ID NOs: 2439 and 2440; SEQ ID NOs: 2441 and 2442; SEQ ID NOs: 2443 and 2444; SEQ ID NOs: 2445 and 2446; SEQ ID NOs: 2447 and 2448; SEQ ID NOs: 2449 and 2450; SEQ ID NOs: 2451 and 2452; SEQ ID NOs: 2453 and 2454; SEQ ID NOs: 2455 and 2456; SEQ ID NOs: 2457 and 2458; SEQ ID NOs: 2459 and 2460; SEQ ID NOs: 2461 and 2462; SEQ ID NOs: 2463 and 2464; SEQ ID NOs: 2465 and 2466; SEQ ID NOs: 2467 and 2468; SEQ ID NOs: 2469 and 2470; SEQ ID NOs: 2471 and 2472; SEQ ID NOs: 2473 and 2474; SEQ ID NOs: 2475 and 2476; SEQ ID NOs: 2477 and 2478; SEQ ID NOs: 2479 and 2480; SEQ ID NOs: 2481 and 2482; SEQ ID NOs: 2483 and 2484; SEQ ID NOs: 2485 and 2486; SEQ ID NOs: 2487 and 2488; SEQ ID NOs: 2489 and 2490; SEQ ID NOs: 2491 and 2492; SEQ ID NOs: 2493 and 2494; SEQ ID NOs: 2495 and 2496; SEQ ID NOs: 2497 and 2498; SEQ ID NOs: 2499 and 2500; SEQ ID NOs: 2501 and 2502; SEQ ID NOs: 2503 and 2504; SEQ ID NOs: 2505 and 2506; SEQ ID NOs: 2507 and 2508; SEQ ID NOs: 2509 and 2510; SEQ ID NOs: 2511 and 2512; SEQ ID NOs: 2513 and 2514; SEQ ID NOs: 2515 and 2516; SEQ ID NOs: 2517 and 2518; SEQ ID NOs: 2519 and 2520; SEQ ID NOs: 2521 and 2522; SEQ ID NOs: 2523 and 2524; SEQ ID NOs: 2525 and 2526; SEQ ID NOs: 2527 and 2528; SEQ ID NOs: 2529 and 2530; SEQ ID NOs: 2531 and 2532; SEQ ID NOs: 2533 and 2534; SEQ ID NOs: 2535 and 2536; SEQ ID NOs: 2537 and 2538; SEQ ID NOs: 2539 and 2540; SEQ ID NOs: 2541 and 2542; SEQ ID NOs: 2543 and 2544; SEQ ID NOs: 2545 and 2546; SEQ ID NOs: 2547 and 2548; SEQ ID NOs: 2549 and 2550; SEQ ID NOs: 2551 and 2552; SEQ ID NOs: 2553 and 2554; SEQ ID NOs: 2555 and 2556; SEQ ID NOs: 2557 and 2558; SEQ ID NOs: 2559 and 2560; SEQ ID NOs: 2561 and 2562; SEQ ID NOs: 2563 and 2564; SEQ ID NOs: 2565 and 2566; SEQ ID NOs: 2567 and 2568; SEQ ID NOs: 2569 and 2570; SEQ ID NOs: 2571 and 2572; SEQ ID NOs: 2573 and 2574; SEQ ID NOs: 2575 and 2576; SEQ ID NOs: 2577 and 2578; SEQ ID NOs: 2579 and 2580; SEQ ID NOs: 2581 and 2582; SEQ ID NOs: 2583 and 2584; SEQ ID NOs: 2585 and 2586; SEQ ID NOs: 2587 and 2588; SEQ ID NOs: 2589 and 2590; SEQ ID NOs: 2591 and 2592; SEQ ID NOs: 2593 and 2594; SEQ ID NOs: 2595 and 2596; SEQ ID NOs: 2597 and 2598; SEQ ID NOs: 2599 and 2600; SEQ ID NOs: 2601 and 2602; SEQ ID NOs: 2603 and 2604; SEQ ID NOs: 2605 and 2606; SEQ ID NOs: 2607 and 2608; SEQ ID NOs: 2609 and 2610; SEQ ID NOs: 2611 and 2612; SEQ ID NOs: 2613 and 2614; SEQ ID NOs: 2615 and 2616; SEQ ID NOs: 2617 and 2618; SEQ ID NOs: 2619 and 2620; SEQ ID NOs: 2621 and 2622; SEQ ID NOs: 2623 and 2624; SEQ ID NOs: 2625 and 2626; SEQ ID NOs: 2627 and 2628; SEQ ID NOs: 2629 and 2630; SEQ ID NOs: 2631 and 2632; SEQ ID NOs: 2633 and 2634; SEQ ID NOs: 2635 and 2636; SEQ ID NOs: 2637 and 2638; SEQ ID NOs: 2639 and 2640; SEQ ID NOs: 2641 and 2642; SEQ ID NOs: 2643 and 2644; SEQ ID NOs: 2645 and 2646; SEQ ID NOs: 2647 and 2648; SEQ ID NOs: 2649 and 2650; SEQ ID NOs: 2651 and 2652; SEQ ID NOs: 2653 and 2654; SEQ ID NOs: 2655 and 2656; SEQ ID NOs: 2657 and 2658; SEQ ID NOs: 2659 and 2660; SEQ ID NOs: 2661 and 2662; SEQ ID NOs: 2663 and 2664; SEQ ID NOs: 2665 and 2666; SEQ ID NOs: 2667 and 2668; SEQ ID NOs: 2669 and 2670; SEQ ID NOs: 2671 and 2672; SEQ ID NOs: 2673 and 2674; SEQ ID NOs: 2675 and 2676; SEQ ID NOs: 2677 and 2678; SEQ ID NOs: 2679 and 2680; SEQ ID NOs: 2681 and 2682; SEQ ID NOs: 2683 and 2684; SEQ ID NOs: 2685 and 2686; SEQ ID NOs: 2687 and 2688; SEQ ID NOs: 2689 and 2690; SEQ ID NOs: 2691 and 2692; SEQ ID NOs: 2693 and 2694; SEQ ID NOs: 2695 and 2696; SEQ ID NOs: 2697 and 2698; SEQ ID NOs: 2699 and 2700; SEQ ID NOs: 2701 and 2702; SEQ ID NOs: 2703 and 2704; SEQ ID NOs: 2705 and 2706; SEQ ID NOs: 2707 and 2708; SEQ ID NOs: 2709 and 2710; SEQ ID NOs: 2711 and 2712; SEQ ID NOs: 2713 and 2714; SEQ ID NOs: 2715 and 2716; SEQ ID NOs: 2717 and 2718; SEQ ID NOs: 2719 and 2720; SEQ ID NOs: 2721 and 2722; SEQ ID NOs: 2723 and 2724; SEQ ID NOs: 2725 and 2726; SEQ ID NOs: 2727 and 2728; SEQ ID NOs: 2729 and 2730; SEQ ID NOs: 2731 and 2732; SEQ ID NOs: 2733 and 2734; SEQ ID NOs: 2735 and 2736; SEQ ID NOs: 2737 and 2738; SEQ ID NOs: 2739 and 2740; SEQ ID NOs: 2741 and 2742; SEQ ID NOs: 2743 and 2744; SEQ ID NOs: 2745 and 2746; SEQ ID NOs: 2747 and 2748; SEQ ID NOs: 2749 and 2750; SEQ ID NOs: 2751 and 2752; SEQ ID NOs: 2753 and 2754; SEQ ID NOs: 2755 and 2756; SEQ ID NOs: 2757 and 2758; SEQ ID NOs: 2759 and 2760; SEQ ID NOs: 2761 and 2762; SEQ ID NOs: 2763 and 2764; SEQ ID NOs: 2765 and 2766; SEQ ID NOs: 2767 and 2768; SEQ ID NOs: 2769 and 2770; SEQ ID NOs: 2771 and 2772; SEQ ID NOs: 2773 and 2774; SEQ ID NOs: 2775 and 2776; SEQ ID NOs: 2777 and 2778; SEQ ID NOs: 2779 and 2780; SEQ ID NOs: 2781 and 2782; SEQ ID NOs: 2783 and 2784; SEQ ID NOs: 2785 and 2786; SEQ ID NOs: 2787 and 2788; SEQ ID NOs: 2789 and 2790; SEQ ID NOs: 2791 and 2792; SEQ ID NOs: 2793 and 2794; SEQ ID NOs: 2795 and 2796; SEQ ID NOs: 2797 and 2798; SEQ ID NOs: 2799 and 2800; SEQ ID NOs: 2801 and 2802; SEQ ID NOs: 2803 and 2804; SEQ ID NOs: 2805 and 2806; SEQ ID NOs: 2807 and 2808; SEQ ID NOs: 2809 and 2810; SEQ ID NOs: 2811 and 2812; SEQ ID NOs: 2813 and 2814; SEQ ID NOs: 2815 and 2816; SEQ ID NOs: 2817 and 2818; SEQ ID NOs: 2819 and 2820; SEQ ID NOs: 2821 and 2822; SEQ ID NOs: 2823 and 2824; SEQ ID NOs: 2825 and 2826; SEQ ID NOs: 2827 and 2828; SEQ ID NOs: 2829 and 2830; SEQ ID NOs: 2831 and 2832; SEQ ID NOs: 2833 and 2834; SEQ ID NOs: 2835 and 2836; SEQ ID NOs: 2837 and 2838; SEQ ID NOs: 2839 and 2840; SEQ ID NOs: 2841 and 2842; SEQ ID NOs: 2843 and 2844; SEQ ID NOs: 2845 and 2846; SEQ ID NOs: 2847 and 2848; SEQ ID NOs: 2849 and 2850; SEQ ID NOs: 2851 and 2852; SEQ ID NOs: 2853 and 2854; SEQ ID NOs: 2855 and 2856; SEQ ID NOs: 2857 and 2858; SEQ ID NOs: 2859 and 2860; SEQ ID NOs: 2861 and 2862; SEQ ID NOs: 2863 and 2864; SEQ ID NOs: 2865 and 2866; SEQ ID NOs: 2867 and 2868; SEQ ID NOs: 2869 and 2870; SEQ ID NOs: 2871 and 2872; SEQ ID NOs: 2873 and 2874; SEQ ID NOs: 2875 and 2876; SEQ ID NOs: 2877 and 2878; SEQ ID NOs: 2879 and 2880; SEQ ID NOs: 2881 and 2882; SEQ ID NOs: 2883 and 2884; SEQ ID NOs: 2885 and 2886; SEQ ID NOs: 2887 and 2888; SEQ ID NOs: 2889 and 2890; SEQ ID NOs: 2891 and 2892; SEQ ID NOs: 2893 and 2894; SEQ ID NOs: 2895 and 2896; SEQ ID NOs: 2897 and 2898; SEQ ID NOs: 2899 and 2900; SEQ ID NOs: 2901 and 2902; SEQ ID NOs: 2903 and 2904; SEQ ID NOs: 2905 and 2906; SEQ ID NOs: 2907 and 2908; SEQ ID NOs: 2909 and 2910; SEQ ID NOs: 2911 and 2912; SEQ ID NOs: 2913 and 2914; SEQ ID NOs: 2915 and 2916; SEQ ID NOs: 2917 and 2918; SEQ ID NOs: 2919 and 2920; SEQ ID NOs: 2921 and 2922; SEQ ID NOs: 2923 and 2924; SEQ ID NOs: 2925 and 2926; SEQ ID NOs: 2927 and 2928; SEQ ID NOs: 2929 and 2930; SEQ ID NOs: 2931 and 2932; SEQ ID NOs: 2933 and 2934; SEQ ID NOs: 2935 and 2936; SEQ ID NOs: 2937 and 2938; SEQ ID NOs: 2939 and 2940; SEQ ID NOs: 2941 and 2942; SEQ ID NOs: 2943 and 2944; SEQ ID NOs: 2945 and 2946; SEQ ID NOs: 2947 and 2948; SEQ ID NOs: 2949 and 2950; SEQ ID NOs: 2951 and 2952; SEQ ID NOs: 2953 and 2954; SEQ ID NOs: 2955 and 2956; SEQ ID NOs: 2957 and 2958; SEQ ID NOs: 2959 and 2960; SEQ ID NOs: 2961 and 2962; SEQ ID NOs: 2963 and 2964; SEQ ID NOs: 2965 and 2966; SEQ ID NOs: 2967 and 2968; SEQ ID NOs: 2969 and 2970; SEQ ID NOs: 2971 and 2972; SEQ ID NOs: 2973 and 2974; SEQ ID NOs: 2975 and 2976; SEQ ID NOs: 2977 and 2978; SEQ ID NOs: 2979 and 2980; SEQ ID NOs: 2981 and 2982; SEQ ID NOs: 2983 and 2984; SEQ ID NOs: 2985 and 2986; SEQ ID NOs: 2987 and 2988; SEQ ID NOs: 2989 and 2990; SEQ ID NOs: 2991 and 2992; SEQ ID NOs: 2993 and 2994; SEQ ID NOs: 2995 and 2996; SEQ ID NOs: 2997 and 2998; SEQ ID NOs: 2999 and 3000; SEQ ID NOs: 3001 and 3002; SEQ ID NOs: 3003 and 3004; SEQ ID NOs: 3005 and 3006; SEQ ID NOs: 3007 and 3008; SEQ ID NOs: 3009 and 3010; SEQ ID NOs: 3011 and 3012; SEQ ID NOs: 3013 and 3014; SEQ ID NOs: 3015 and 3016; SEQ ID NOs: 3017 and 3018; SEQ ID NOs: 3019 and 3020; SEQ ID NOs: 3021 and 3022; SEQ ID NOs: 3023 and 3024; SEQ ID NOs: 3025 and 3026; SEQ ID NOs: 3027 and 3028; SEQ ID NOs: 3029 and 3030; SEQ ID NOs: 3031 and 3032; SEQ ID NOs: 3033 and 3034; SEQ ID NOs: 3035 and 3036; SEQ ID NOs: 3037 and 3038; SEQ ID NOs: 3039 and 3040; SEQ ID NOs: 3041 and 3042; SEQ ID NOs: 3043 and 3044; SEQ ID NOs: 3045 and 3046; SEQ ID NOs: 3047 and 3048; SEQ ID NOs: 3049 and 3050; SEQ ID NOs: 3051 and 3052; SEQ ID NOs: 3053 and 3054; SEQ ID NOs: 3055 and 3056; SEQ ID NOs: 3057 and 3058; SEQ ID NOs: 3059 and 3060; SEQ ID NOs: 3061 and 3062; SEQ ID NOs: 3063 and 3064; SEQ ID NOs: 3065 and 3066; SEQ ID NOs: 3067 and 3068; SEQ ID NOs: 3069 and 3070; SEQ ID NOs: 3071 and 3072; SEQ ID NOs: 3073 and 3074; SEQ ID NOs: 3075 and 3076; SEQ ID NOs: 3077 and 3078; SEQ ID NOs: 3079 and 3080; SEQ ID NOs: 3081 and 3082; SEQ ID NOs: 3083 and 3084; SEQ ID NOs: 3085 and 3086; SEQ ID NOs: 3087 and 3088; SEQ ID NOs: 3089 and 3090; SEQ ID NOs: 3091 and 3092; SEQ ID NOs: 3093 and 3094; SEQ ID NOs: 3095 and 3096; SEQ ID NOs: 3097 and 3098; SEQ ID NOs: 3099 and 3100; SEQ ID NOs: 3101 and 3102; SEQ ID NOs: 3103 and 3104; SEQ ID NOs: 3105 and 3106; SEQ ID NOs: 3107 and 3108; SEQ ID NOs: 3109 and 3110; SEQ ID NOs: 3111 and 3112; SEQ ID NOs: 3113 and 3114; SEQ ID NOs: 3115 and 3116; SEQ ID NOs: 3117 and 3118; SEQ ID NOs: 3119 and 3120; SEQ ID NOs: 3121 and 3122; SEQ ID NOs: 3123 and 3124; SEQ ID NOs: 3125 and 3126; SEQ ID NOs: 3127 and 3128; SEQ ID NOs: 3129 and 3130; SEQ ID NOs: 3131 and 3132; SEQ ID NOs: 3133 and 3134; SEQ ID NOs: 3135 and 3136; SEQ ID NOs: 3137 and 3138. As a non-limiting example, the DMD-saRNA which are saRNA duplexes may be used to modulate dystrophin proteins levels and/or treat DMD-associated dilated cardiomyopathy or Duchenne and Becker muscular dystrophy.

### PAX5 Gene

[0292] As another non-limiting example, provided is a method of modulating the expression of PAX5 gene comprising administering saRNA of the present invention, wherein the saRNA targets an antisense RNA transcript of PAX5 gene. These saRNAs are called PAX5-saRNA. In one embodiment, the expression of PAX5 gene is increased by at least 20, 30, 40%, or at least 45, 50, 55, 60, 65, 70, 75%, or at least 80% in the presence of the saRNA of the present invention compared to the expression of PAX5 gene in the absence of the saRNA of the present invention. In a further embodiment, the expression of PAX5 gene is increased by a factor of at least 2, 3, 4, 5, 6, 7, 8, 9, 10, or by a factor of at least 15, 20, 25, 30, 35, 40, 45, 50, or by a factor of at least 60, 70, 80, 90, 100, in the presence of the saRNA of the present invention compared to the expression of PAX5 gene in the absence of the saRNA of the present invention. The modulation of the expression of PAX5 gene may be reflected or determined by the change of PAX5 mRNA levels.

[0293] PAX5-saRNAs may be single-stranded and comprise 14-30 nucleotides. The sequence of a single-stranded PAX5-saRNA may have at least 60%, 70%, 80% or 90% identity with a sequence selected from the sequences of the antisense strands in Table 8-2. In one embodiment, the single-stranded saRNA comprises a sequence selected from the sequences of the antisense strands in Table 8-2. In one embodiment, the single-stranded PAX5-saRNA may have a 3′ tail. The sequence of a single-stranded PAX5-saRNA with a 3′ tail may have at least 60%, 70%, 80% or 90% identity with a sequence selected from the sequences of the antisense strands in Table 9. In one embodiment, the single-stranded saRNA comprises a sequence selected from the sequences of the antisense strands in Table 9.

[0294] PAX5-saRNAs may be double-stranded. The two strands form a duplex and each strand comprises 14-30 nucleotides. The first strand of a double-stranded PAX5-saRNA may have at least 60%, 70%, 80% or 90% identity with a sequence selected from the sequences of the antisense strands in Table 8-2. In one embodiment, the first strand of the double-stranded saRNA comprises a sequence selected from the sequences of the antisense strands in Table 8-2. The second strand of a double-stranded PAX5-saRNA may have at least 60%, 70%, 80% or 90% identity with a sequence selected from the sequences of the sense strands in Table 8-2. In one embodiment, the second strand of the double-stranded saRNA comprises a sequence selected from the sequences of the sense strands in Table 8-2. In one embodiment, the double-stranded PAX5-saRNA may have a 3′ overhang on each strand. The first strand of a double-stranded PAX5-saRNA may have at least 60%, 70%, 80% or 90% identity with a sequence selected from the sequences of the antisense strands in Table 9. In one embodiment, the first strand of the double-stranded saRNA comprises a sequence selected from the sequences of the antisense strands in Table 9. The second strand of a double-stranded PAX5-saRNA may have at least 60%, 70%, 80% or 90% identity with a sequence selected from the sequences of the sense strands in Table 9. In one embodiment, the second strand of the double-stranded saRNA comprises a sequence selected from the sequences of the sense strands in Table 9, i.e., SEQ ID NOS 544, 546, 548, 550, 552, 554, 556, 558, and 560.

[0295] PAX-saRNAs may be modified or unmodified.

[0296] Table 8-1 describes the target gene, the targeted sequence, the genomic location of the targeted sequence and the relative location of PAX5-saRNAs with no 3′ overhang. In Table 8-1, the targeted sequence is defined as a region on the template strand of the target gene which is identical to a region on the target antisense RNA transcript to which the antisense strand of an saRNA hybridizes. In Table 8-1, the relative location is the distance from the 5′ end of the targeted sequence to the TSS. A negative number represents a location upstream of the TSS and a positive number represents a location downstream of the TSS.

TABLE 8-1
Sequences of PAX5-saRNAs (with no 3′ overhang)

| | | | Genomic Location | |
|---|---|---|---|---|
| | Target | | of the Targeted | Relative |
| saRNA ID | Gene | Targeted sequence | sequence | Location |
| PAX.NM_016734-Pr-2 | PAX | ctcagatatttccgaatta | chr9: 37033476 plus | 1000 |
| | human | (SEQ ID NO. 517) | strand | |
| PAX.NM_016734-Pr-3 | PAX | gaggttaagctgtgaaata | chr9: 37035021 plus | −545 |
| | human | (SEQ ID NO. 518) | strand | |
| PAX.NM_016734-Pr- | PAX | ggttaagctgtgaaatact | chr9: 37035023 plus | −547 |
| 20 | human | (SEQ ID NO. 519) | strand | |
| PAX.NM_016734-Pr- | PAX | tggaggttaagctgtgaaa | chr9: 37035019 plus | −543 |
| 25 | human | (SEQ ID NO. 520) | strand | |
| PAX.NM_016734-Pr- | PAX | tccgaggagtcggataatt | chr9: 37033994 plus | 482 |
| 27 | human | (SEQ ID NO. 521) | strand | |
| PAX.NM_016734-Pr- | PAX | tcagatatttccgaattac | chr9: 37033477 plus | 999 |
| 31 | human | (SEQ ID NO. 522) | strand | |
| PAX.NM_016734-Pr- | PAX | agatatttggactgatgca | chr9: 37033796 plus | 680 |
| 36 | human | (SEQ ID NO. 523) | strand | |
| PAX.NM_016734-Pr- | PAX | gtccgaggagtcggataat | chr9: 37033993 plus | 483 |
| 37 | human | (SEQ ID NO. 524) | strand | |
| PAX.NM_016734-Pr- | PAX | cacagatatttggactgat | chr9: 37033793 plus | 683 |
| 39 | human | (SEQ ID NO. 525) | strand | |

TABLE 8-2
Sequences of PAX5-saRNAs (with no 3′ overhang)

| saRNA ID | Sense (passenger) | Antisense (guide) |
|---|---|---|
| PAX.NM_016734-Pr-2 | CUCAGAUAUUUCCGAAUUA | UAAUUCGGAAAUAUCUGAG |
| | (SEQ ID NO. 526) | (SEQ ID NO. 527) |
| PAX.NM_016734-Pr-3 | GAGGUUAAGCUGUGAAAUA | UAUUUCACAGCUUAACCUC |
| | (SEQ ID NO. 528) | (SEQ ID NO. 529) |
| PAX.NM_016734-Pr-20 | GGUUAAGCUGUGAAAUACU | AGUAUUUCACAGCUUAACC |
| | (SEQ ID NO. 530) | (SEQ ID NO. 531) |
| PAX.NM_016734-Pr-25 | UGGAGGUUAAGCUGUGAAA | UUUCACAGCUUAACCUCCA |
| | (SEQ ID NO. 532) | (SEQ ID NO. 533) |
| PAX.NM_016734-Pr-27 | UCCGAGGAGUCGGAUAAUU | AAUUAUCCGACUCCUCGGA |
| | (SEQ ID NO. 534) | (SEQ ID NO. 535) |
| PAX.NM_016734-Pr-31 | UCAGAUAUUUCCGAAUUAC | GUAAUUCGGAAAUAUCUGA |
| | (SEQ ID NO. 536) | (SEQ ID NO. 537) |
| PAX.NM_016734-Pr-36 | AGAUAUUUGGACUGAUGCA | UGCAUCAGUCCAAAUAUCU |
| | (SEQ ID NO. 538) | (SEQ ID NO. 539) |
| PAX.NM_016734-Pr-37 | GUCCGAGGAGUCGGAUAAU | AUUAUCCGACUCCUCGGAC |
| | (SEQ ID NO. 540) | (SEQ ID NO. 541) |
| PAX.NM_016734-Pr-39 | CACAGAUAUUUGGACUGAU | AUCAGUCCAAAUAUCUGUG |
| | (SEQ ID NO. 542) | (SEQ ID NO. 543) |

TABLE 9
Sequences of PAX5-saRNAs (with 3′ overhang)

| saRNA ID | Sense (passenger) | Antisense (guide) |
|---|---|---|
| PAX.NM_016734- | CUCAGAUAUUUCCGAAUUAUU (SEQ | UAAUUCGGAAAUAUCUGAGUU |
| Pr-2′ | ID NO. 544) | (SEQ ID NO. 545) |
| PAX.NM_016734- | GAGGUUAAGCUGUGAAAUAUU | UAUUUCACAGCUUAACCUCUU (SEQ |
| Pr-3′ | (SEQ ID NO. 546) | ID NO. 547) |
| PAX.NM_016734- | GGUUAAGCUGUGAAAUACUUU | AGUAUUUCACAGCUUAACCUU (SEQ |
| Pr-20′ | (SEQ ID NO. 548) | ID NO. 549) |
| PAX.NM_016734- | UGGAGGUUAAGCUGUGAAAUU | UUUCACAGCUUAACCUCCAUU (SEQ |
| Pr-25′ | (SEQ ID NO. 550) | ID NO. 551) |
| PAX.NM_016734- | UCCGAGGAGUCGGAUAAUUUU | AAUUAUCCGACUCCUCGGAUU (SEQ |
| Pr-27′ | (SEQ ID NO. 552) | ID NO. 553) |
| PAX.NM_016734- | UCAGAUAUUUCCGAAUUACUU (SEQ | GUAAUUCGGAAAUAUCUGAUU |
| Pr-31′ | ID NO. 554) | (SEQ ID NO. 555) |
| PAX.NM_016734- | AGAUAUUUGGACUGAUGCAUU | UGCAUCAGUCCAAAUAUCUUU (SEQ |
| Pr-36′ | (SEQ ID NO. 556) | ID NO. 557) |
| PAX.NM_016734- | GUCCGAGGAGUCGGAUAAUUU | AUUAUCCGACUCCUCGGACUU (SEQ |
| Pr-37′ | (SEQ ID NO. 558) | ID NO. 559) |
| PAX.NM_016734- | CACAGAUAUUUGGACUGAUUU | AUCAGUCCAAAUAUCUGUGUU (SEQ |
| Pr-39′ | (SEQ ID NO. 560) | ID NO. 561) |

[0297] PAX5 gene encodes a protein called B-cell lineage specific activation protein (BSAP), a member of the paired box (PAX) family of transcription factors. Paired box transcription factors are important regulators in early development, and alterations in the expression of their genes are thought to contribute to neoplastic transformation. BSAP is expressed at early, but not late stages of B-cell differentiation. Its expression has also been detected in developing CNS and testis and so the encoded protein may also play a role in neural development and spermatogenesis (Adams et al., Genes Dev., vol. 6:1589 (1992), the contents of which are incorporated herein by reference in their entirety). PAX5 gene plays an important role in B-cell differentiation as well as neural development and spermatogenesis. It is also involved in the regulation of the CD19 gene, a B-lymphoid-specific target gene. Diseases associated with PAX5 include lymphoplasmacytic lymphoma and diffuse large B-cell lymphoma of the central nervous system.

[0298] In one embodiment, provided is a method of modulating BSAP protein levels comprising administering PAX5-saRNA of the present invention, wherein the PAX5-saRNA targets an antisense RNA transcript of PAX5 gene. In one embodiment, BSAP protein level is increased by at least 20, 30, 40%, or at least 45, 50, 55, 60, 65, 70, 75%, or at least 80% in the presence of the PAX5-saRNA of the present invention compared to BSAP protein level in the absence of the PAX5-saRNA of the present invention. In a further embodiment, BSAP protein level is increased by a factor of at least 2, 3, 4, 5, 6, 7, 8, 9, 10, or by a factor of at least 15, 20, 25, 30, 35, 40, 45, 50, or by a factor of at least 60, 70, 80, 90, 100, in the presence of the PAX5-saRNA of the present invention compared to BSAP protein level in the absence of the PAX5-saRNA of the present invention.

[0299] In another embodiment, provided is a method of modulating B-cell differentiation comprising administering the PAX5-saRNA of the present invention, wherein the PAX5-saRNA targets an antisense RNA transcript of PAX5 gene.

[0300] In another embodiment, provided is a method of modulating neural development and spermatogenesis comprising administering the PAX5-saRNA of the present invention, wherein the PAX5-saRNA targets an antisense RNA transcript of PAX5 gene.

[0301] In another embodiment, provided is a method of treating lymphoplasmacytic lymphoma or diffuse large B-cell lymphoma of the central nervous system comprising administering the PAX5-saRNA of the present invention, wherein the PAX5-saRNA targets an antisense RNA transcript of PAX5 gene, and wherein the symptoms of treating lymphoplasmacytic lymphoma or diffuse large B-cell lymphoma are reduced.

[0302] In one embodiment, the PAX5-saRNA of the present invention is an antisense sequence such as, but not limited to, SEQ ID NO: 527, 529, 531, 533, 535, 537, 539, 541, 543, 545, 547, 549, 551, 553, 555, 557, 559, 561, 5216, 5218, 5220, 5222, 5224, 5226, 5228, 5230, 5232, 5234, 5236, 5238, 5240, 5242, 5244, 5246, 5248, 5250, 5252, 5254, 5256, 5258, 5260, 5262, 5264, 5266, 5268, 5270, 5272, 5274, 5276, 5278, 5280, 5282, 5284, 5286, 5288, 5290, 5292, 5294, 5296, 5298, 5300, 5302, 5304, 5306, 5308, 5310, 5312 and 5314. As a non-limiting example, these PAX5-saRNA sequences may be used to modulate BSAP protein levels, and/or treat lymphoplasmacytic lymphoma or diffuse large B-cell lymphoma of the central nervous system.

[0303] In one embodiment, the PAX5-saRNA of the present invention is an saRNA duplex. The saRNA duplex may be a pair of sense and antisense sequences such as, but not limited to, SEQ ID NOs: 526 and 527; SEQ ID NOs: 528 and 529; SEQ ID NOs: 530 and 531; SEQ ID NOs: 532 and 533; SEQ ID NOs: 534 and 535; SEQ ID NOs: 536 and 537; SEQ ID NOs: 538 and 539; SEQ ID NOs: 540 and 541; SEQ ID NOs: 542 and 543; SEQ ID NOs: 544 and 545; SEQ ID NOs: 546 and 547; SEQ ID NOs: 548 and 549; SEQ ID NOs: 550 and 551; SEQ ID NOs: 552 and 553; SEQ ID NOs: 554 and 555; SEQ ID NOs: 556 and 557; SEQ ID NOs: 558 and 559; SEQ ID NOs: 560 and 561; SEQ ID NOs: 5215 and 5216; SEQ ID NOs: 5217 and 5218; SEQ ID NOs: 5219 and 5220; SEQ ID NOs: 5221 and 5222; SEQ ID NOs: 5223 and 5224; SEQ ID NOs: 5225 and 5226; SEQ ID NOs: 5227 and 5228; SEQ ID NOs: 5229 and 5230; SEQ ID NOs: 5231 and 5232; SEQ ID NOs: 5233 and 5234; SEQ ID NOs: 5235 and 5236; SEQ ID NOs: 5237 and 5238; SEQ ID NOs: 5239 and 5240; SEQ ID NOs: 5241 and 5242; SEQ ID NOs: 5243 and 5244; SEQ ID NOs: 5245 and 5246; SEQ ID NOs: 5247 and 5248; SEQ ID NOs: 5249 and 5250; SEQ ID NOs: 5251 and 5252; SEQ ID NOs: 5253 and 5254; SEQ ID NOs: 5255 and 5256; SEQ ID NOs: 5257 and 5258; SEQ ID NOs: 5259 and 5260; SEQ ID NOs: 5261 and 5262; SEQ ID NOs: 5263 and 5264; SEQ ID NOs: 5265 and 5266; SEQ ID NOs: 5267 and 5268; SEQ ID NOs: 5269 and 5270; SEQ ID NOs: 5271 and 5272; SEQ ID NOs: 5273 and 5274; SEQ ID NOs: 5275 and 5276; SEQ ID NOs: 5277 and 5278; SEQ ID NOs: 5279 and 5280; SEQ ID NOs: 5281 and 5282; SEQ ID NOs: 5283 and 5284; SEQ ID NOs: 5285 and 5286; SEQ ID NOs: 5287 and 5288; SEQ ID NOs: 5289 and 5290; SEQ ID NOs: 5291 and 5292; SEQ ID NOs: 5293 and 5294; SEQ ID NOs: 5295 and 5296; SEQ ID NOs: 5297 and 5298; SEQ ID NOs: 5299 and 5300; SEQ ID NOs: 5301 and 5302; SEQ ID NOs: 5303 and 5304; SEQ ID NOs: 5305 and 5306; SEQ ID NOs: 5307 and 5308; SEQ ID NOs: 5309 and 5310; SEQ ID NOs: 5311 and 5312; SEQ ID NOs: 5313 and 5314. As a non-limiting example, these PAX5-saRNA sequences which are saRNA duplexes may be used to modulate BSAP protein levels, and/or treat lymphoplasmacytic lymphoma or diffuse large B-cell lymphoma of the central nervous system.

### SCN1A Gene

[0304] As another non-limiting example, provided is a method of modulating the expression of SCN1A gene comprising administering saRNA of the present invention, wherein the saRNA targets an antisense RNA transcript of SCN1A gene. These saRNAs are called SCN1A-saRNA. In one embodiment, the expression of SCN1A gene is increased by at least 20, 30, 40%, or at least 45, 50, 55, 60, 65, 70, 75%, or at least 80% in the presence of the saRNA of the present invention compared to the expression of SCN1A gene in the absence of the saRNA of the present invention. In a further embodiment, the expression of SCN1A gene is increased by a factor of at least 2, 3, 4, 5, 6, 7, 8, 9, 10, or by a factor of at least 15, 20, 25, 30, 35, 40, 45, 50, or by a factor of at least 60, 70, 80, 90, 100, in the presence of the saRNA of the present invention compared to the expression of SCN1A gene in the absence of the saRNA of the present invention. The modulation of the expression of SCN1A gene may be reflected or determined by the change of SCN1A mRNA levels.

[0305] SCN1A-saRNAs may be single-stranded and comprise 14-30 nucleotides. The sequence of a single-stranded SCN1A-saRNA may have at least 60%, 70%, 80% or 90% identity with a sequence selected from the sequences of the antisense strands in Table 10-2. In one embodiment, the single-stranded saRNA comprises a sequence selected from the sequences of the antisense strands in Table 10-2. In one embodiment, the single-stranded SCN1A-saRNA may have a 3′ tail. The sequence of a single-stranded SCN1A-saRNA with a 3′ tail may have at least 60%, 70%, 80% or 90% identity with a sequence selected from the sequences of the antisense strands in Table 11. In one embodiment, the single-stranded saRNA comprises a sequence selected from the sequences of the antisense strands in Table 11.

[0306] SCN1A-saRNAs may be double-stranded. The two strands form a duplex and each strand comprises 14-30 nucleotides. The first strand of a double-stranded SCN1A-saRNA may have at least 60%, 70%, 80% or 90% identity with a sequence selected from the sequences of the antisense strands in Table 10-2. In one embodiment, the first strand of the double-stranded saRNA comprises a sequence selected from the sequences of the antisense strands in Table 10-2. The second strand of a double-stranded SCN1A-saRNA may have at least 60%, 70%, 80% or 90% identity with a sequence selected from the sequences of the sense strands in Table 10-2. In one embodiment, the second strand of the double-stranded saRNA comprises a sequence selected from the sequences of the sense strands in Table 10-2. In one embodiment, the double-stranded SCN1A-saRNA may have a 3′ overhang on each strand. The first strand of a double-stranded SCN1A-saRNA may have at least 60%, 70%, 80% or 90% identity with a sequence selected from the sequences of the antisense strands in Table 11. In one embodiment, the first strand of the double-stranded saRNA comprises a sequence selected from the sequences of the antisense strands in Table 11. The second strand of a double-stranded SCN1A-saRNA may have at least 60%, 70%, 80% or 90% identity with a sequence selected from the sequences of the sense strands in Table 11. In one embodiment, the second strand of the double-stranded saRNA comprises a sequence selected from the sequences of the sense strands in Table 11.

[0307] SCN1A-saRNAs may be modified or unmodified. Table 10-1 describes the target gene, the targeted sequence, the genomic location of the targeted sequence and the relative location of SCN1A-saRNAs with no 3′ overhang. In Table 10-1, the targeted sequence is defined as a region on the template strand of the target gene which is identical to a region on the target antisense RNA transcript to which the antisense strand of an saRNA hybridizes. In Table 10-1, the relative location is the distance from the 5′ end of the targeted sequence to the TSS. A negative number represents a location upstream of the TSS and a positive number represents a location downstream of the TSS.

TABLE 10-1
Sequences of SCN1A-saRNAs (with no 3′ overhang)

| | Target | | Genomic Location of the | Relative |
|---|---|---|---|---|
| saRNA ID | Gene | Targeted sequence | Targeted sequence | Location |
| SCN1A.NM_001202435- | SCN1A | tgagataatctgtgttaga | chr2: 167006477 plus strand | −835 |
| Pr-1 | human | (SEQ ID NO. 562) | | |
| SCN1A.NM_001202435- | SCN1A | gatgatgtccgataagcaa | chr2: 167005347 plus strand | 295 |
| Pr-8 | human | (SEQ ID NO. 563) | | |
| SCN1A.NM_001202435- | SCN1A | tagacttactcctagatat | chr2: 167006492 plus strand | −850 |
| Pr- | human | (SEQ ID NO. 564) | | |
| 10 | | | | |
| SCN1A.NM_001202435- | SCN1A | gtgttaatctggaggaaca | chr2: 167005609 plus strand | 33 |
| Pr- | human | (SEQ ID NO. 565) | | |
| 17 | | | | |
| SCN1A.NM_001202435- | SCN1A | agtaaatctctttgagcta | chr2: 167005229 plus strand | 413 |
| Pr- | human | (SEQ ID NO. 566) | | |
| 21 | | | | |
| SCN1A.NM_001202435- | SCN1A | atgaattgctatcagtaaa | chr2: 167005965 plus strand | −323 |
| Pr- | human | (SEQ ID NO. 567) | | |
| 24 | | | | |
| SCN1A.NM_001202435- | SCN1A | agacttactcctagatatc | chr2: 167006493 plus strand | −851 |
| Pr- | human | (SEQ ID NO. 568) | | |
| 26 | | | | |
| SCN1A.NM_001202435- | SCN1A | ggagtdgcatggaaatca | chr2: 167005778 plus strand | −136 |
| Pr- | human | (SEQ ID NO. 569) | | |
| 29 | | | | |
| SCN1A.NM_001202435- | SCN1A | tggtgggttgccgataaat | chr2: 167006317 plus strand | −675 |
| Pr- | human | (SEQ ID NO. 570) | | |
| 31 | | | | |
| SCN1A.NM_001202435- | SCN1A | gtgggttgccgataaatgt | chr2: 167006319 plus strand | −677 |
| Pr- | human | (SEQ ID NO. 571) | | |
| 32 | | | | |
| SCN1A.NM_001202435- | SCN1A | aaatgtcagatgtgttaat | chr2: 167006332 plus strand | −690 |
| Pr- | human | (SEQ ID NO. 572) | | |
| 34 | | | | |
| SCN1A.NM_006920- | SCN1A | atgtcatttatgtgagtaa | chr2: 166930813 plus strand | −664 |
| Pr-30 | human | (SEQ ID NO. 573) | | |
| SCN1A.NM_006920- | SCN1A | gagagaatctgtcaatttg | chr2: 166929259 plus strand | 890 |
| Pr-34 | human | (SEQ ID NO. 574) | | |
| SCN1A.NM_006920- | SCN1A | ctatatcactaatgagtta | chr2: 166930465 plus strand | −316 |
| Pr-35 | human | (SEQ ID NO. 575) | | |
| SCN1A.NM_006920- | SCN1A | tggactaagagatgttaat | chr2: 166930213 plus strand | −64 |
| Pr-37 | human | (SEQ ID NO. 576) | | |

TABLE 10-2
Sequences of SCN1A-saRNAs (with no 3′ overhang)

| saRNA ID | Sense (passenger) | Antisense (guide) |
|---|---|---|
| SCN1A.NM_001202435- | UGAGAUAAUCUGUGUU | UCUAACACAGAUUAUCUCA |
| Pr-1 | AGA (SEQ ID NO. 577) | (SEQ ID NO. 578) |
| SCN1A.NM_001202435- | GAUGAUGUCCGAUAAG | UUGCUUAUCGGACAUCAUC |
| Pr-8 | CAA (SEQ ID NO. 579) | (SEQ ID NO. 580) |
| SCN1A.NM_001202435- | UAGACUUACUCCUAGA | AUAUCUAGGAGUAAGUCUA |
| Pr-10 | UAU (SEQ ID NO. 581) | (SEQ ID NO. 582) |
| SCN1A.NM_001202435- | GUGUUAAUCUGGAGGA | UGUUCCUCCAGAUUAACAC |
| Pr-17 | ACA (SEQ ID NO. 583) | (SEQ ID NO. 584) |
| SCN1A.NM_001202435- | AGUAAAUCUCUUUGAG | UAGCUCAAAGAGAUUUACU |
| Pr-21 | CUA (SEQ ID NO. 585) | (SEQ ID NO. 586) |
| SCN1A.NM_001202435- | AUGAAUUGCUAUCAGU | UUUACUGAUAGCAAUUCAU |
| Pr-24 | AAA (SEQ ID NO. 587) | (SEQ ID NO. 588) |
| SCN1A.NM_001202435- | AGACUUACUCCUAGAU | GAUAUCUAGGAGUAAGUCU |
| Pr-26 | AUC (SEQ ID NO. 589) | (SEQ ID NO. 590) |
| SCN1A.NM_001202435- | GGAGUUUGCAUGGAAA | UGAUUUCCAUGCAAACUCC |
| Pr-29 | UCA (SEQ ID NO. 591) | (SEQ ID NO. 592) |
| SCN1A.NM_001202435- | UGGUGGGUUGCCGAUA | AUUUAUCGGCAACCCACCA |
| Pr-31 | AAU (SEQ ID NO. 593) | (SEQ ID NO. 594) |
| SCN1A.NM_001202435- | GUGGGUUGCCGAUAAA | ACAUUUAUCGGCAACCCAC |
| Pr-32 | UGU (SEQ ID NO. 595) | (SEQ ID NO. 596) |
| SCN1A.NM_001202435- | AAAUGUCAGAUGUGUU | AUUAACACAUCUGACAUUU |
| Pr-34 | AAU (SEQ ID NO. 597) | (SEQ ID NO. 598) |
| SCN1A.NM_006920- | AUGUCAUUUAUGUGAG | UUACUCACAUAAAUGACAU |
| Pr-30 | UAA (SEQ ID NO. 599) | (SEQ ID NO. 600) |
| SCN1A.NM_006920- | GAGAGAAUCUGUCAAU | CAAAUUGACAGAUUCUCUC |
| Pr-34 | UUG (SEQ ID NO. 601) | (SEQ ID NO. 602) |
| SCN1A.NM_006920- | CUAUAUCACUAAUGAG | UAACUCAUUAGUGAUAUAG |
| Pr-35 | UUA (SEQ ID NO. 603) | (SEQ ID NO. 604) |
| SCN1A.NM_006920- | UGGACUAAGAGAUGUU | AUUAACAUCUCUUAGUCCA |
| Pr-37 | AAU (SEQ ID NO. 605) | (SEQ ID NO. 606) |

TABLE 11
Sequences of SCN1A-saRNAs (with 3′ overhang)

| saRNA ID | Sense (passenger) | Antisense (guide) |
|---|---|---|
| SCN1A.NM_001202435- | UGAGAUAAUCUGUGUUAGAUU | UCUAACACAGAUUAUCUCAUU |
| Pr-1′ | (SEQ ID NO. 607) | (SEQ ID NO. 608) |
| SCN1A.NM_001202435- | GAUGAUGUCCGAUAAGCAAUU | UUGCUUAUCGGACAUCAUCUU |
| Pr-8′ | (SEQ ID NO. 609) | (SEQ ID NO. 610) |
| SCN1A.NM_001202435- | UAGACUUACUCCUAGAUAUUU | AUAUCUAGGAGUAAGUCUAUU |
| Pr-10′ | (SEQ ID NO. 611) | (SEQ ID NO. 612) |
| SCN1A.NM_001202435- | GUGUUAAUCUGGAGGAACAUU | UGUUCCUCCAGAUUAACACUU |
| Pr-17′ | (SEQ ID NO. 613) | (SEQ ID NO. 614) |
| SCN1A.NM_001202435- | AGUAAAUCUCUUUGAGCUAUU | UAGCUCAAAGAGAUUUACUUU |
| Pr-21′ | (SEQ ID NO. 615) | (SEQ ID NO. 616) |
| SCN1A.NM_001202435- | AUGAAUUGCUAUCAGUAAAUU | UUUACUGAUAGCAAUUCAUUU |
| Pr-24′ | (SEQ ID NO. 617) | (SEQ ID NO. 618) |
| SCN1A.NM_001202435- | AGACUUACUCCUAGAUAUCUU | GAUAUCUAGGAGUAAGUCUUU |
| Pr-26′ | (SEQ ID NO. 619) | (SEQ ID NO. 620) |
| SCN1A.NM_001202435- | GGAGUUUGCAUGGAAAUCAUU | UGAUUUCCAUGCAAACUCCUU |
| Pr-29′ | (SEQ ID NO. 621) | (SEQ ID NO. 622) |
| SCN1A.NM_001202435- | UGGUGGGUUGCCGAUAAAUUU | AUUUAUCGGCAACCCACCAUU |
| Pr-31′ | (SEQ ID NO. 623) | (SEQ ID NO. 624) |
| SCN1A.NM_001202435- | GUGGGUUGCCGAUAAAUGUUU | ACAUUUAUCGGCAACCCACUU |
| Pr-32′ | (SEQ ID NO. 625) | (SEQ ID NO. 626) |
| SCN1A.NM_001202435- | AAAUGUCAGAUGUGUUAAUUU | AUUAACACAUCUGACAUUUUU |
| Pr-34′ | (SEQ ID NO. 627) | (SEQ ID NO. 628) |
| SCN1A.NM_006920-Pr- | AUGUCAUUUAUGUGAGUAAUU | UUACUCACAUAAAUGACAUUU |
| 30′ | (SEQ ID NO. 629) | (SEQ ID NO. 630) |
| SCN1A.NM_006920-Pr- | GAGAGAAUCUGUCAAUUUGUU | CAAAUUGACAGAUUCUCUCUU |
| 34′ | (SEQ ID NO. 631) | (SEQ ID NO. 632) |
| SCN1A.NM_006920-Pr- | CUAUAUCACUAAUGAGUUAUU | UAACUCAUUAGUGAUAUAGUU |
| 35′ | (SEQ ID NO. 633) | (SEQ ID NO. 634) |
| SCN1A.NM_006920-Pr- | UGGACUAAGAGAUGUUAAUUU | AUUAACAUCUCUUAGUCCAUU |
| 37′ | (SEQ ID NO. 635) | (SEQ ID NO. 636) |

[0308] The SCN1A gene encodes the alpha subunit of a sodium channel called NaV1.1. These channels are found in the brain and muscles, where they control the flow of sodium ions into cells. In the brain, NaV1.1 channels are involved in transmitting signals from one nerve cell (neuron) to another. Communication between neurons depends on chemicals called neurotransmitters, which are released from one neuron and taken up by neighboring neurons. The flow of sodium ions through NaV1.1 channels helps determine when neurotransmitters will be released. Mutations in the SCN1A gene change building blocks in the NaV1.1 channel and change the channel's structure. The abnormal channels stay open longer than usual, which increases the flow of sodium ions into neurons. This increase triggers the cell to release more neurotransmitters. The resulting changes in signaling between neurons make people more susceptible to developing these severe headaches. Diseases associated with SCN1A mutations include, but not limited to, familial hemiplegic migraine and seizure disorders (Martin et al., J Biol Chem, vol. 285 (13):9823 (2010), the contents of which are incorporated herein by reference in their entirety).

[0309] In one embodiment, provided is a method of modulating the sodium channel NaV1.1 comprising administering SCN1A-saRNA of the present invention, wherein the SCN1A-saRNA targets an antisense RNA transcript of SCN1A gene.

[0310] In another embodiment, provided is a method of treating familial hemiplegic migraine or seizure disorders comprising administering SCN1A-saRNA of the present invention, wherein the SCN1A-saRNA targets an antisense RNA transcript of SCN1A gene.

[0311] In one embodiment, the APOA1-saRNA of the present invention is an antisense sequence such as, but not limited to, SEQ ID NO: 578, 580, 582, 584, 586, 588, 590, 592, 594, 596, 598, 600, 602, 604, 606, 608, 610, 612, 614, 616, 618, 620, 622, 624, 626, 628, 630, 632, 634, 636, 5316, 5318, 5320, 5322, 5324, 5326, 5328, 5330, 5332, 5334, 5336, 5338, 5340, 5342, 5344, 5346, 5348, 5350, 5352, 5354, 5356, 5358, 5360, 5362, 5364, 5366, 5368, 5370, 5372, 5374, 5376, 5378, 5380, 5382, 5384, 5386, 5388, 5390, 5392, 5394, 5396, 5398, 5400, 5402, 5404, 5406, 5408, 5410, 5412, 5414, 5416, 5418, 5420, 5422, 5424, 5426, 5428, 5430, 5432, 5434, 5436, 5438, 5440, 5442, 5444, 5446, 5448, 5450, 5452, 5454, 5456, 5458, 5460, 5462, 5464, 5466, 5468, 5470, 5472, 5474, 5476, 5478, 5480, 5482, 5484, 5486, 5488, 5490, 5492, 5494, 5496, 5498, 5500, 5502, 5504, 5506, 5508, 5510, 5512, 5514, 5516 and 5518. As a non-limiting example, these SCN1A-saRNA sequences may be used to modulate the sodium channel NaV1.1 and/or treat familial hemiplegic migraine or seizure disorders.

[0312] In one embodiment, the SCN1A-saRNA of the present invention is an saRNA duplex. The saRNA duplex may be a pair of sense and antisense sequences such as, but not limited to, SEQ ID NOs: 577 and 578; SEQ ID NOs: 579 and 580; SEQ ID NOs: 581 and 582; SEQ ID NOs: 583 and 584; SEQ ID NOs: 585 and 586; SEQ ID NOs: 587 and 588; SEQ ID NOs: 589 and 590; SEQ ID NOs: 591 and 592; SEQ ID NOs: 593 and 594; SEQ ID NOs: 595 and 596; SEQ ID NOs: 597 and 598; SEQ ID NOs: 599 and 600; SEQ ID NOs: 601 and 602; SEQ ID NOs: 603 and 604; SEQ ID NOs: 605 and 606; SEQ ID NOs: 607 and 608; SEQ ID NOs: 609 and 610; SEQ ID NOs: 611 and 612; SEQ ID NOs: 613 and 614; SEQ ID NOs: 615 and 616; SEQ ID NOs: 617 and 618; SEQ ID NOs: 619 and 620; SEQ ID NOs: 621 and 622; SEQ ID NOs: 623 and 624; SEQ ID NOs: 625 and 626; SEQ ID NOs: 627 and 628; SEQ ID NOs: 629 and 630; SEQ ID NOs: 631 and 632; SEQ ID NOs: 633 and 634; SEQ ID NOs: 635 and 636; SEQ ID NOs: 5315 and 5316; SEQ ID NOs: 5317 and 5318; SEQ ID NOs: 5319 and 5320; SEQ ID NOs: 5321 and 5322; SEQ ID NOs: 5323 and 5324; SEQ ID NOs: 5325 and 5326; SEQ ID NOs: 5327 and 5328; SEQ ID NOs: 5329 and 5330; SEQ ID NOs: 5331 and 5332; SEQ ID NOs: 5333 and 5334; SEQ ID NOs: 5335 and 5336; SEQ ID NOs: 5337 and 5338; SEQ ID NOs: 5339 and 5340; SEQ ID NOs: 5341 and 5342; SEQ ID NOs: 5343 and 5344; SEQ ID NOs: 5345 and 5346; SEQ ID NOs: 5347 and 5348; SEQ ID NOs: 5349 and 5350; SEQ ID NOs: 5351 and 5352; SEQ ID NOs: 5353 and 5354; SEQ ID NOs: 5355 and 5356; SEQ ID NOs: 5357 and 5358; SEQ ID NOs: 5359 and 5360; SEQ ID NOs: 5361 and 5362; SEQ ID NOs: 5363 and 5364; SEQ ID NOs: 5365 and 5366; SEQ ID NOs: 5367 and 5368; SEQ ID NOs: 5369 and 5370; SEQ ID NOs: 5371 and 5372; SEQ ID NOs: 5373 and 5374; SEQ ID NOs: 5375 and 5376; SEQ ID NOs: 5377 and 5378; SEQ ID NOs: 5379 and 5380; SEQ ID NOs: 5381 and 5382; SEQ ID NOs: 5383 and 5384; SEQ ID NOs: 5385 and 5386; SEQ ID NOs: 5387 and 5388; SEQ ID NOs: 5389 and 5390; SEQ ID NOs: 5391 and 5392; SEQ ID NOs: 5393 and 5394; SEQ ID NOs: 5395 and 5396; SEQ ID NOs: 5397 and 5398; SEQ ID NOs: 5399 and 5400; SEQ ID NOs: 5401 and 5402; SEQ ID NOs: 5403 and 5404; SEQ ID NOs: 5405 and 5406; SEQ ID NOs: 5407 and 5408; SEQ ID NOs: 5409 and 5410; SEQ ID NOs: 5411 and 5412; SEQ ID NOs: 5413 and 5414; SEQ ID NOs: 5415 and 5416; SEQ ID NOs: 5417 and 5418; SEQ ID NOs: 5419 and 5420; SEQ ID NOs: 5421 and 5422; SEQ ID NOs: 5423 and 5424; SEQ ID NOs: 5425 and 5426; SEQ ID NOs: 5427 and 5428; SEQ ID NOs: 5429 and 5430; SEQ ID NOs: 5431 and 5432; SEQ ID NOs: 5433 and 5434; SEQ ID NOs: 5435 and 5436; SEQ ID NOs: 5437 and 5438; SEQ ID NOs: 5439 and 5440; SEQ ID NOs: 5441 and 5442; SEQ ID NOs: 5443 and 5444; SEQ ID NOs: 5445 and 5446; SEQ ID NOs: 5447 and 5448; SEQ ID NOs: 5449 and 5450; SEQ ID NOs: 5451 and 5452; SEQ ID NOs: 5453 and 5454; SEQ ID NOs: 5455 and 5456; SEQ ID NOs: 5457 and 5458; SEQ ID NOs: 5459 and 5460; SEQ ID NOs: 5461 and 5462; SEQ ID NOs: 5463 and 5464; SEQ ID NOs: 5465 and 5466; SEQ ID NOs: 5467 and 5468; SEQ ID NOs: 5469 and 5470; SEQ ID NOs: 5471 and 5472; SEQ ID NOs: 5473 and 5474; SEQ ID NOs: 5475 and 5476; SEQ ID NOs: 5477 and 5478; SEQ ID NOs: 5479 and 5480; SEQ ID NOs: 5481 and 5482; SEQ ID NOs: 5483 and 5484; SEQ ID NOs: 5485 and 5486; SEQ ID NOs: 5487 and 5488; SEQ ID NOs: 5489 and 5490; SEQ ID NOs: 5491 and 5492; SEQ ID NOs: 5493 and 5494; SEQ ID NOs: 5495 and 5496; SEQ ID NOs: 5497 and 5498; SEQ ID NOs: 5499 and 5500; SEQ ID NOs: 5501 and 5502; SEQ ID NOs: 5503 and 5504; SEQ ID NOs: 5505 and 5506; SEQ ID NOs: 5507 and 5508; SEQ ID NOs: 5509 and 5510; SEQ ID NOs: 5511 and 5512; SEQ ID NOs: 5513 and 5514; SEQ ID NOs: 5515 and 5516; SEQ ID NOs: 5517 and 5518. As a non-limiting example, these SCN1A-saRNA sequences which are saRNA duplexes may be used to modulate the sodium channel NaV1.1 and/or treat familial hemiplegic migraine or seizure disorders.

### IDUA Gene

[0313] As another non-limiting example, provided is a method of modulating the expression of IDUA gene comprising administering saRNA of the present invention, wherein the saRNA targets an antisense RNA transcript of IDUA gene. These saRNAs are called IDUA-saRNA. In one embodiment, the expression of IDUA gene is increased by at least 20, 30, 40%, or at least 45, 50, 55, 60, 65, 70, 75%, or at least 80% in the presence of the IDUA-saRNA of the present invention compared to the expression of IDUA gene in the absence of the saRNA of the present invention. In a further embodiment, the expression of IDUA gene is increased by a factor of at least 2, 3, 4, 5, 6, 7, 8, 9, 10, or by a factor of at least 15, 20, 25, 30, 35, 40, 45, 50, or by a factor of at least 60, 70, 80, 90, 100, in the presence of the IDUA-saRNA of the present invention compared to the expression of IDUA gene in the absence of the IDUA-saRNA of the present invention. The modulation of the expression of IDUA gene may be reflected or determined by the change of IDUA mRNA levels.

[0314] IDUA-saRNAs may be single-stranded and comprise 14-30 nucleotides. The sequence of a single-stranded IDUA-saRNA may have at least 60%, 70%, 80% or 90% identity with a sequence selected from the sequences of the antisense strands in Table 12-2. In one embodiment, the single-stranded saRNA comprises a sequence selected from the sequences of the antisense strands in Table 12-2. In one embodiment, the single-stranded IDUA-saRNA may have a 3′ tail. The sequence of a single-stranded IDUA-saRNA with a 3′ tail may have at least 60%, 70%, 80% or 90% identity with a sequence selected from the sequences of the antisense strands in Table 13. In one embodiment, the single-stranded saRNA comprises a sequence selected from the sequences of the antisense strands in Table 13.

[0315] IDUA-saRNAs may be double-stranded. The two strands form a duplex and each strand comprises 14-30 nucleotides. The first strand of a double-stranded IDUA-saRNA may have at least 60%, 70%, 80% or 90% identity with a sequence selected from the sequences of the antisense strands in Table 12-2. In one embodiment, the first strand of the double-stranded saRNA comprises a sequence selected from the sequences of the antisense strands in Table 12-2. The second strand of a double-stranded IDUA-saRNA may have at least 60%, 70%, 80% or 90% identity with a sequence selected from the sequences of the sense strands in Table 12-2. In one embodiment, the second strand of the double-stranded saRNA comprises a sequence selected from the sequences of the sense strands in Table 12-2. In one embodiment, the double-stranded IDUA-saRNA may have a 3′ overhang on each strand. The first strand of a double-stranded IDUA-saRNA may have at least 60%, 70%, 80% or 90% identity with a sequence selected from the sequences of the antisense strands in Table 13. In one embodiment, the first strand of the double-stranded saRNA comprises a sequence selected from the sequences of the antisense strands in Table 13. The second strand of a double-stranded IDUA-saRNA may have at least 60%, 70%, 80% or 90% identity with a sequence selected from the sequences of the sense strands in Table 13. In one embodiment, the second strand of the double-stranded saRNA comprises a sequence selected from the sequences of the sense strands in Table 13.

[0316] IDUA-saRNAs may be modified or unmodified.

[0317] Table 12-1 describes the target gene, the targeted sequence, the genomic location of the targeted sequence and the relative location of IDUA-saRNAs with no 3′ overhang. In Table 12-1, the targeted sequence is defined as a region on the template strand of the target gene which is identical to a region on the target antisense RNA transcript to which the antisense strand of an saRNA hybridizes. In Table 12-1, the relative location is the distance from the 5′ end of the targeted sequence to the TSS. A negative number represents a location upstream of the TSS and a positive number represents a location downstream of the TSS.

TABLE 12-1
Sequences of IDUA-saRNAs (with no 3′ overhang)

| | | | Genomic Location | |
|---|---|---|---|---|
| | | | of the Targeted | Relative |
| saRNA ID | Target Gene | Targeted sequence | sequence | Location |
| IDUA.NM_000203- | IDUA human | atgtgtgaatccaagcaaa | chr4: 980039 minus | −726 |
| Pr-8 | | (SEQ ID NO. 637) | strand | |
| IDUA.NM_000203- | IDUA human | agccagatgcgatggtata | chr4: 979853 minus | −912 |
| Pr-15 | | (SEQ ID NO. 638) | strand | |
| IDUA.NM_000203- | IDUA human | tgtgaatccaagcaaacat | chr4: 980036 minus | −729 |
| Pr-22 | | (SEQ ID NO. 639) | strand | |
| IDUA.NM_000203- | IDUA human | gagtaaagcgtgcgcttta | chr4: 980418 minus | −347 |
| Pr-25 | | (SEQ ID NO. 640) | strand | |
| IDUA.NM_000203- | IDUA human | tgggagattgcttgagctt | chr4: 979800 minus | −965 |
| Pr-29 | | (SEQ ID NO. 641) | strand | |
| IDUA.NM_000203- | IDUA human | cgtaggtaatgtgcaaata | chr4: 980178 minus | −587 |
| Pr-40 | | (SEQ ID NO. 642) | strand | |

TABLE 12-2
Sequences of IDUA-saRNAs (with no 3′ overhang)

| saRNA ID | Sense (passenger) | Antisense (guide) |
|---|---|---|
| IDUA.NM_000203-Pr-8 | AUGUGUGAAUCCAAGCAAA | UUUGCUUGGAUUCACACAU |
| | (SEQ ID NO. 643) | (SEQ ID NO. 644) |
| IDUA.NM_000203-Pr-15 | AGCCAGAUGCGAUGGUAUA | UAUACCAUCGCAUCUGGCU |
| | (SEQ ID NO. 645) | (SEQ ID NO. 646) |
| IDUA.NM_000203-Pr-22 | UGUGAAUCCAAGCAAACAU | AUGUUUGCUUGGAUUCACA |
| | (SEQ ID NO. 647) | (SEQ ID NO. 648) |
| IDUA.NM_000203-Pr-25 | GAGUAAAGCGUGCGCUUUA | UAAAGCGCACGCUUUACUC |
| | (SEQ ID NO. 649) | (SEQ ID NO. 650) |
| IDUA.NM_000203-Pr-29 | UGGGAGAUUGCUUGAGCUU | AAGCUCAAGCAAUCUCCCA |
| | (SEQ ID NO. 651) | (SEQ ID NO. 652) |
| IDUA.NM_000203-Pr-40 | CGUAGGUAAUGUGCAAAUA | UAUUUGCACAUUACCUACG |
| | (SEQ ID NO. 653) | (SEQ ID NO. 654) |

TABLE 13
Sequences of IDUA-saRNAs (with 3′ overhang)

| saRNA ID | Sense (passenger) | Antisense (guide) |
|---|---|---|
| IDUA.NM_000203-Pr- | AUGUGUGAAUCCAAGCAAAUU | UUUGCUUGGAUUCACACAUUU |
| 8′ | (SEQ ID NO. 655) | (SEQ ID NO. 656) |
| IDUA.NM_000203-Pr- | AGCCAGAUGCGAUGGUAUAUU | UAUACCAUCGCAUCUGGCUUU |
| 15′ | (SEQ ID NO. 657) | (SEQ ID NO. 658) |
| IDUA.NM_000203-Pr- | UGUGAAUCCAAGCAAACAUUU | AUGUUUGCUUGGAUUCACAUU |
| 22′ | (SEQ ID NO. 659) | (SEQ ID NO. 660) |
| IDUA.NM_000203-Pr- | GAGUAAAGCGUGCGCUUUAUU | UAAAGCGCACGCUUUACUCUU |
| 25′ | (SEQ ID NO. 661) | (SEQ ID NO. 662) |
| IDUA.NM_000203-Pr- | UGGGAGAUUGCUUGAGCUUUU | AAGCUCAAGCAAUCUCCCAUU |
| 29′ | (SEQ ID NO. 663) | (SEQ ID NO. 664) |
| IDUA.NM_000203-Pr- | CGUAGGUAAUGUGCAAAUAUU | UAUUUGCACAUUACCUACGUU |
| 40′ | (SEQ ID NO. 665) | (SEQ ID NO. 666) |

[0318] The IDUA gene encodes an enzyme called alpha-L-iduronidase, which is essential for the breakdown of large sugar molecules called glycosaminoglycans (GAGs). Through a process called hydrolysis, alpha-L-iduronidase uses water molecules to break down a molecule known as unsulfated alpha-L-iduronic acid, which is present in two GAGs called heparan sulfate and dermatan sulfate. Alpha-L-iduronidase is located in lysosomes, compartments within cells that digest and recycle different types of molecules. Mutations of IDUA gene cause mucopolysaccharidosis type I (MPS I) (Chkioua et al., Diagn Pathol. vol. 6:47 (2011), the contents of which are incorporated herein by reference in their entirety). The lack of alpha-L-iduronidase enzyme activity leads to the accumulation of heparan sulfate and dermatan sulfate within the lysosomes. The buildup of these GAGs increases the size of the lysosomes, which is why many tissues and organs are enlarged in MPS I.

[0319] In one embodiment, provided is a method of modulating alpha-L-iduronidase protein levels comprising administering IDUA-saRNA of the present invention, wherein the IDUA-saRNA targets an antisense RNA transcript of IDUA gene. In one embodiment, alpha-L-iduronidase protein level is increased by at least 20, 30, 40%, or at least 45, 50, 55, 60, 65, 70, 75%, or at least 80% in the presence of the IDUA-saRNA of the present invention compared to alpha-L-iduronidase protein level in the absence of the IDUA-saRNA of the present invention. In a further embodiment, alpha-L-iduronidase protein level is increased by a factor of at least 2, 3, 4, 5, 6, 7, 8, 9, 10, or by a factor of at least 15, 20, 25, 30, 35, 40, 45, 50, or by a factor of at least 60, 70, 80, 90, 100, in the presence of the IDUA-saRNA of the present invention compared to alpha-L-iduronidase protein level in the absence of the IDUA-saRNA of the present invention.

[0320] In another embodiment, provided is a method of modulating the levels of unsulfated alpha-L-iduronic acid, heparan sulfate or dermatan sulfate, comprising administering IDUA-saRNA of the present invention, wherein the IDUA-saRNA targets an antisense RNA transcript of IDUA gene. In one embodiment, the level of unsulfated alpha-L-iduronic acid, heparan sulfate or dermatan sulfate is reduced by at least 10%, 20%, 30%, or at least 40%, 50%, 60%, or 70%, 80%, 90% in the presence of the IDUA-saRNA of the present invention compared to the level of unsulfated alpha-L-iduronic acid, heparan sulfate or dermatan sulfate in the absence of the IDUA-saRNA of the present invention.

[0321] In another embodiment, provided is a method of treating MPS I comprising administering IDUA-saRNA of the present invention, wherein the IDUA-saRNA targets an antisense RNA transcript of IDUA gene, and wherein the symptoms of MPS I are reduced.

[0322] In one embodiment, the IDUA-saRNA of the present invention is an antisense sequence such as, but not limited to, SEQ ID NO: 644, 646, 648, 650, 652, 654, 656, 658, 660, 662, 664, 666, 4042, 4044, 4046, 4048, 4050, 4052, 4054, 4056, 4058, 4060, 4062, 4064, 4066, 4068, 4070, 4072, 4074, 4076, 4078, 4080, 4082, 4084, 4086, 4088, 4090, 4092, 4094, 4096, 4098, 4100, 4102, 4104, 4106 and 4108. As a non-limiting example, these IDUA-saRNA sequences may be used to modulate alpha-L-iduronidase protein levels, modulate the level of unsulfated alpha-L-iduronic acid, heparan sulfate or dermatan sulfate and/or treat MPS I.

[0323] In one embodiment, the IDUA-saRNA of the present invention is an saRNA duplex. The saRNA duplex may be a pair of sense and antisense sequences such as, but not limited to, SEQ ID NOs: 643 and 644; SEQ ID NOs: 645 and 646; SEQ ID NOs: 647 and 648; SEQ ID NOs: 649 and 650; SEQ ID NOs: 651 and 652; SEQ ID NOs: 653 and 654; SEQ ID NOs: 655 and 656; SEQ ID NOs: 657 and 658; SEQ ID NOs: 659 and 660; SEQ ID NOs: 661 and 662; SEQ ID NOs: 663 and 664; SEQ ID NOs: 665 and 666; SEQ ID NOs: 4041 and 4042; SEQ ID NOs: 4043 and 4044; SEQ ID NOs: 4045 and 4046; SEQ ID NOs: 4047 and 4048; SEQ ID NOs: 4049 and 4050; SEQ ID NOs: 4051 and 4052; SEQ ID NOs: 4053 and 4054; SEQ ID NOs: 4055 and 4056; SEQ ID NOs: 4057 and 4058; SEQ ID NOs: 4059 and 4060; SEQ ID NOs: 4061 and 4062; SEQ ID NOs: 4063 and 4064; SEQ ID NOs: 4065 and 4066; SEQ ID NOs: 4067 and 4068; SEQ ID NOs: 4069 and 4070; SEQ ID NOs: 4071 and 4072; SEQ ID NOs: 4073 and 4074; SEQ ID NOs: 4075 and 4076; SEQ ID NOs: 4077 and 4078; SEQ ID NOs: 4079 and 4080; SEQ ID NOs: 4081 and 4082; SEQ ID NOs: 4083 and 4084; SEQ ID NOs: 4085 and 4086; SEQ ID NOs: 4087 and 4088; SEQ ID NOs: 4089 and 4090; SEQ ID NOs: 4091 and 4092; SEQ ID NOs: 4093 and 4094; SEQ ID NOs: 4095 and 4096; SEQ ID NOs: 4097 and 4098; SEQ ID NOs: 4099 and 4100; SEQ ID NOs: 4101 and 4102; SEQ ID NOs: 4103 and 4104; SEQ ID NOs: 4105 and 4106; SEQ ID NOs: 4107 and 4108. As a non-limiting example, these IDUA-saRNA sequences which are saRNA duplexes may be used to modulate alpha-L-iduronidase protein levels, modulate the level of unsulfated alpha-L-iduronic acid, heparan sulfate or dermatan sulfate and/or treat MPS I.

### FNDC5 Gene

[0324] As another non-limiting example, provided is a method of modulating the expression of FNDC5 gene comprising administering saRNA of the present invention, wherein the saRNA targets an antisense RNA transcript of FNDC5 gene. These saRNAs are called FNDC5-saRNA. In one embodiment, the expression of FNDC5 gene is increased by at least 20, 30, 40%, or at least 45, 50, 55, 60, 65, 70, 75%, or at least 80% in the presence of the FNDC5-saRNA of the present invention compared to the expression of FNDC5 gene in the absence of the FNDC5-saRNA of the present invention. In a further embodiment, the expression of FNDC5 gene is increased by a factor of at least 2, 3, 4, 5, 6, 7, 8, 9, 10, or by a factor of at least 15, 20, 25, 30, 35, 40, 45, 50, or by a factor of at least 60, 70, 80, 90, 100, in the presence of the FNDC5-saRNA of the present invention compared to the expression ofFNDC5 gene in the absence of the FNDC5-saRNA of the present invention. The modulation of the expression of FNDC5 gene may be reflected or determined by the change ofFNDC5 mRNA levels.

[0325] FNDC5-saRNAs may be single-stranded and comprise 14-30 nucleotides. The sequence of a single-stranded FNDC5-saRNA may have at least 60%, 70%, 80% or 90% identity with a sequence selected from the sequences of the antisense strands in Table 14-2. In one embodiment, the single-stranded saRNA comprises a sequence selected from the sequences of the antisense strands in Table 14-2. In one embodiment, the single-stranded FNDC5-saRNA may have a 3′ tail. The sequence of a single-stranded FNDC5-saRNA with a 3′ tail may have at least 60%, 70%, 80% or 90% identity with a sequence selected from the sequences of the antisense strands in Table 15. In one embodiment, the single-stranded saRNA comprises a sequence selected from the sequences of the antisense strands in Table 15.

[0326] FNDC5-saRNAs may be double-stranded. The two strands form a duplex and each strand comprises 14-30 nucleotides. The first strand of a double-stranded FNDC5-saRNA may have at least 60%, 70%, 80% or 90% identity with a sequence selected from the sequences of the antisense strands in Table 14-2. In one embodiment, the first strand of the double-stranded saRNA comprises a sequence selected from the sequences of the antisense strands in Table 14-2. The second strand of a double-stranded FNDC5-saRNA may have at least 60%, 70%, 80% or 90% identity with a sequence selected from the sequences of the sense strands in Table 14-2. In one embodiment, the second strand of the double-stranded saRNA comprises a sequence selected from the sequences of the sense strands in Table 14-2. In one embodiment, the double-stranded FNDC5-saRNA may have a 3′ overhang on each strand. The first strand of a double-stranded FNDC5-saRNA may have at least 60%, 70%, 80% or 90% identity with a sequence selected from the sequences of the antisense strands in Table 15. In one embodiment, the first strand of the double-stranded saRNA comprises a sequence selected from the sequences of the antisense strands in Table 15. The second strand of a double-stranded FNDC5-saRNA may have at least 60%, 70%, 80% or 90% identity with a sequence selected from the sequences of the sense strands in Table 15. In one embodiment, the second strand of the double-stranded saRNA comprises a sequence selected from the sequences of the sense strands in Table 15.

[0327] FNDC5-saRNAs may be modified or unmodified.

[0328] Table 14-1 describes the target gene, the targeted sequence, the genomic location of the targeted sequence and the relative location of FNDC5-saRNAs with no 3′ overhang. In Table 14-1, the targeted sequence is defined as a region on the template strand of the target gene which is identical to a region on the target antisense RNA transcript to which the antisense strand of an saRNA hybridizes. In Table 14-1, the relative location is the distance from the 5′ end of the targeted sequence to the TSS. A negative number represents a location upstream of the TSS and a positive number represents a location downstream of the TSS.

TABLE 14-1
Sequences of FNDC5-saRNAs (with no 3′ overhang)

| | Target | | Genomic Location of the | Relative |
|---|---|---|---|---|
| saRNA ID | Gene | Targeted sequence | Targeted sequence | Location |
| FNDC5.NM_001171941- | FNDC5 | gcaaagttctgccacagaa | chr1: 33337658 plus strand | 435 |
| Pr-5 | human | (SEQ ID NO. 667) | | |
| FNDC5.NM_001171941- | FNDC5 | ggagacgtcttgcaaagtt | chr1: 33337647 plus strand | 446 |
| Pr-7 | human | (SEQ ID NO. 668) | | |
| FNDC5.NM_001171941- | FNDC5 | tccggagattcgtgagact | chr1: 33337347 plus strand | 746 |
| Pr-8 | human | (SEQ ID NO. 669) | | |
| FNDC5.NM_001171941- | FNDC5 | cggagattcgtgagactct | chr1: 33337349 plus strand | 744 |
| Pr-13 | human | (SEQ ID NO. 670) | | |
| FNDC5.NM_001171941- | FNDC5 | ggagattcgtgagactcta | chr1: 33337350 plus strand | 743 |
| Pr-14 | human | (SEQ ID NO. 671) | | |
| FNDC5.NM_001171941- | FNDC5 | tcgtgagactctagaattg | chr1: 33337356 plus strand | 737 |
| Pr-16 | human | (SEQ ID NO. 672) | | |
| FNDC5.NM_001171941- | FNDC5 | cagcaatctctaagagcat | chr1: 33337412 plus strand | 681 |
| Pr-17 | human | (SEQ ID NO. 673) | | |
| FNDC5.NM_001171941- | FNDC5 | aggagacgtcttgcaaagt | chr1: 33337646 plus strand | 447 |
| Pr-19 | human | (SEQ ID NO. 674) | | |
| FNDC5.NM_001171941- | FNDC5 | gcagcaatctctaagagca | chr1: 33337411 plus strand | 682 |
| Pr-22 | human | (SEQ ID NO. 675) | | |
| FNDC5.NM_001171941- | FNDC5 | ggaagtgaggtctaccgat | chr1: 33337721 plus strand | 372 |
| Pr-36 | human | (SEQ ID NO. 676) | | |
| FNDC5.NM_001171941- | FNDC5 | tgcattatgtggcttaatt | chr1: 33337148 plus strand | 945 |
| Pr-38 | human | (SEQ ID NO. 677) | | |
| FNDC5.NM_001171941- | FNDC5 | cccacgactatccgaaatt | chr1: 33337553 plus strand | 540 |
| Pr-39 | human | (SEQ ID NO. 678) | | |
| FNDC5.NM_153756- | FNDC5 | tccggagattcgtgagact | chr1: 33337347 plus strand | −933 |
| Pr-3 | human | (SEQ ID NO. 679) | | |
| FNDC5.NM_153756- | FNDC5 | cggagattcgtgagactct | chr1: 33337349 plus strand | −935 |
| Pr-6 | human | (SEQ ID NO. 680) | | |
| FNDC5.NM_153756- | FNDC5 | ggagattcgtgagactcta | chr1: 33337350 plus strand | −936 |
| Pr-7 | human | (SEQ ID NO. 681) | | |
| FNDC5.NM_153756- | FNDC5 | tcgtgagactctagaattg | chr1: 33337356 plus strand | −942 |
| Pr-9 | human | (SEQ ID NO. 682) | | |
| FNDC5.NM_153756- | FNDC5 | cagtgtttgggccgagaca | chr1: 33336134 plus strand | 280 |
| Pr-12 | human | (SEQ ID NO. 683) | | |
| FNDC5.NM_153756- | FNDC5 | tgcattatgtggcttaatt | chr1: 33337148 plus strand | −734 |
| Pr-16 | human | (SEQ ID NO. 684) | | |
| FNDC5.NM_153756- | FNDC5 | ggacaagtgccaccgagat | chr1: 33336810 plus strand | −396 |
| Pr-20 | human | (SEQ ID NO. 685) | | |
| FNDC5.NM_153756- | FNDC5 | ctcccaaagctgtgcttaa | chr1: 33337293 plus strand | −879 |
| Pr-24 | human | (SEQ ID NO. 686) | | |
| FNDC5.NM_153756- | FNDC5 | caaagctgtgcttaactga | chr1: 33337297 plus strand | −883 |
| Pr-27 | human | (SEQ ID NO. 687) | | |
| FNDC5.NM_153756- | FNDC5 | gcaaccctgtaaagtcata | chr1: 33337173 plus strand | −759 |
| Pr-30 | human | (SEQ ID NO. 688) | | |

TABLE 14-2
Sequences of FNDC5-saRNAs (with no 3′ overhang)

| saRNA ID | Sense (passenger) | Antisense (guide) |
|---|---|---|
| FNDC5.NM_001171941- | GCAAAGUUCUGCCACAGAA | UUCUGUGGCAGAACUUUGC (SEQ |
| Pr-5 | (SEQ ID NO. 689) | ID NO. 690) |
| FNDC5.NM_001171941- | GGAGACGUCUUGCAAAGUU | AACUUUGCAAGACGUCUCC (SEQ |
| Pr-7 | (SEQ ID NO. 691) | ID NO. 692) |
| FNDC5.NM_001171941- | UCCGGAGAUUCGUGAGACU | AGUCUCACGAAUCUCCGGA (SEQ |
| Pr-8 | (SEQ ID NO. 693) | ID NO. 694) |
| FNDC5.NM_001171941- | CGGAGAUUCGUGAGACUCU | AGAGUCUCACGAAUCUCCG (SEQ |
| Pr-13 | (SEQ ID NO. 695) | ID NO. 696) |
| FNDC5.NM_001171941- | GGAGAUUCGUGAGACUCUA | UAGAGUCUCACGAAUCUCC (SEQ |
| Pr-14 | (SEQ ID NO. 697) | ID NO. 698) |
| FNDC5.NM_001171941- | UCGUGAGACUCUAGAAUUG | CAAUUCUAGAGUCUCACGA (SEQ |
| Pr-16 | (SEQ ID NO. 699) | ID NO. 700) |
| FNDC5.NM_001171941- | CAGCAAUCUCUAAGAGCAU | AUGCUCUUAGAGAUUGCUG (SEQ |
| Pr-17 | (SEQ ID NO. 701) | ID NO. 702) |
| FNDC5.NM_001171941- | AGGAGACGUCUUGCAAAGU | ACUUUGCAAGACGUCUCCU (SEQ |
| Pr-19 | (SEQ ID NO. 703) | ID NO. 704) |
| FNDC5.NM_001171941- | GCAGCAAUCUCUAAGAGCA | UGCUCUUAGAGAUUGCUGC (SEQ |
| Pr-22 | (SEQ ID NO. 705) | ID NO. 706) |
| FNDC5.NM_001171941- | GGAAGUGAGGUCUACCGAU | AUCGGUAGACCUCACUUCC (SEQ |
| Pr-36 | (SEQ ID NO. 707) | ID NO. 708) |
| FNDC5.NM_001171941- | UGCAUUAUGUGGCUUAAUU | AAUUAAGCCACAUAAUGCA (SEQ |
| Pr-38 | (SEQ ID NO. 709) | ID NO. 710) |
| FNDC5.NM_001171941- | CCCACGACUAUCCGAAAUU | AAUUUCGGAUAGUCGUGGG (SEQ |
| Pr-39 | (SEQ ID NO. 711) | ID NO. 712) |
| FNDC5.NM_153756- | UCCGGAGAUUCGUGAGACU | AGUCUCACGAAUCUCCGGA (SEQ |
| Pr-3 | (SEQ ID NO. 713) | ID NO. 714) |
| FNDC5.NM_153756- | CGGAGAUUCGUGAGACUCU | AGAGUCUCACGAAUCUCCG (SEQ |
| Pr-6 | (SEQ ID NO. 715) | ID NO. 716) |
| FNDC5.NM_153756- | GGAGAUUCGUGAGACUCUA | UAGAGUCUCACGAAUCUCC (SEQ |
| Pr-7 | (SEQ ID NO. 717) | ID NO. 718) |
| FNDC5.NM_153756- | UCGUGAGACUCUAGAAUUG | CAAUUCUAGAGUCUCACGA (SEQ |
| Pr-9 | (SEQ ID NO. 719) | ID NO. 720) |
| FNDC5.NM_153756- | CAGUGUUUGGGCCGAGACA | UGUCUCGGCCCAAACACUG (SEQ |
| Pr-12 | (SEQ ID NO. 721) | ID NO. 722) |
| FNDC5.NM_153756- | UGCAUUAUGUGGCUUAAUU | AAUUAAGCCACAUAAUGCA (SEQ |
| Pr-16 | (SEQ ID NO. 723) | ID NO. 724) |
| FNDC5.NM_153756- | GGACAAGUGCCACCGAGAU | AUCUCGGUGGCACUUGUCC (SEQ |
| Pr-20 | (SEQ ID NO. 725) | ID NO. 726) |
| FNDC5.NM_153756- | CUCCCAAAGCUGUGCUUAA | UUAAGCACAGCUUUGGGAG (SEQ |
| Pr-24 | (SEQ ID NO. 727) | ID NO. 728) |
| FNDC5.NM_153756- | CAAAGCUGUGCUUAACUGA | UCAGUUAAGCACAGCUUUG (SEQ |
| Pr-27 | (SEQ ID NO. 729) | ID NO. 730) |
| FNDC5.NM_153756- | GCAACCCUGUAAAGUCAUA | UAUGACUUUACAGGGUUGC (SEQ |
| Pr-30 | (SEQ ID NO. 731) | ID NO. 732) |

TABLE 15
Sequences of FNDC5-saRNAs (with 3′ overhang)

| saRNA ID | Sense (passenger) | Antisense (guide) |
|---|---|---|
| FNDC5.NM_001171941-Pr-5′ | GCAAAGUUCUGCCACAGAAU | UUCUGUGGCAGAACUUUGCU |
| | U (SEQ ID NO. 733) | U (SEQ ID NO. 734) |
| FNDC5.NM_001171941-Pr-7′ | GGAGACGUCUUGCAAAGUUU | AACUUUGCAAGACGUCUCCU |
| | U (SEQ ID NO. 735) | U (SEQ ID NO. 736) |
| FNDC5.NM_001171941-Pr-8′ | UCCGGAGAUUCGUGAGACUU | AGUCUCACGAAUCUCCGGAU |
| | U (SEQ ID NO. 737) | U (SEQ ID NO. 738) |
| FNDC5.NM_001171941-Pr- | CGGAGAUUCGUGAGACUCUU | AGAGUCUCACGAAUCUCCGU |
| 13′ | U (SEQ ID NO. 739) | U (SEQ ID NO. 740) |
| FNDC5.NM_001171941-Pr- | GGAGAUUCGUGAGACUCUAU | UAGAGUCUCACGAAUCUCCU |
| 14′ | U (SEQ ID NO. 741) | U (SEQ ID NO. 742) |
| FNDC5.NM_001171941-Pr- | UCGUGAGACUCUAGAAUUGU | CAAUUCUAGAGUCUCACGAU |
| 16′ | U (SEQ ID NO. 743) | U (SEQ ID NO. 744) |
| FNDC5.NM_001171941-Pr- | CAGCAAUCUCUAAGAGCAUU | AUGCUCUUAGAGAUUGCUGU |
| 17′ | U (SEQ ID NO. 745) | U (SEQ ID NO. 746) |
| FNDC5.NM_001171941-Pr- | AGGAGACGUCUUGCAAAGUU | ACUUUGCAAGACGUCUCCUU |
| 19′ | U (SEQ ID NO. 747) | U (SEQ ID NO. 748) |
| FNDC5.NM_001171941-Pr- | GCAGCAAUCUCUAAGAGCAU | UGCUCUUAGAGAUUGCUGCU |
| 22′ | U (SEQ ID NO. 749) | U (SEQ ID NO. 750) |
| FNDC5.NM_001171941-Pr- | GGAAGUGAGGUCUACCGAUU | AUCGGUAGACCUCACUUCCU |
| 36′ | U (SEQ ID NO. 751) | U (SEQ ID NO. 752) |
| FNDC5.NM_001171941-Pr- | UGCAUUAUGUGGCUUAAUUU | AAUUAAGCCACAUAAUGCAU |
| 38′ | U (SEQ ID NO. 753) | U (SEQ ID NO. 754) |
| FNDC5.NM_001171941-Pr- | CCCACGACUAUCCGAAAUUU | AAUUUCGGAUAGUCGUGGGU |
| 39′ | U (SEQ ID NO. 755) | U (SEQ ID NO. 756) |
| FNDC5.NM_153756-Pr-3′ | UCCGGAGAUUCGUGAGACUU | AGUCUCACGAAUCUCCGGAU |
| | U (SEQ ID NO. 757) | U (SEQ ID NO. 758) |
| FNDC5.NM_153756-Pr-6′ | CGGAGAUUCGUGAGACUCUU | AGAGUCUCACGAAUCUCCGU |
| | U (SEQ ID NO. 759) | U (SEQ ID NO. 760) |
| FNDC5.NM_153756-Pr-7′ | GGAGAUUCGUGAGACUCUAU | UAGAGUCUCACGAAUCUCCU |
| | U (SEQ ID NO. 761) | U (SEQ ID NO. 762) |
| FNDC5.NM_153756-Pr-9′ | UCGUGAGACUCUAGAAUUGU | CAAUUCUAGAGUCUCACGAU |
| | U (SEQ ID NO. 763) | U (SEQ ID NO. 764) |
| FNDC5.NM_153756-Pr-12′ | CAGUGUUUGGGCCGAGACAU | UGUCUCGGCCCAAACACUGU |
| | U (SEQ ID NO. 765) | U (SEQ ID NO. 766) |
| FNDC5.NM_153756-Pr-16′ | UGCAUUAUGUGGCUUAAUUU | AAUUAAGCCACAUAAUGCAU |
| | U (SEQ ID NO. 767) | U (SEQ ID NO. 768) |
| FNDC5.NM_153756-Pr-20′ | GGACAAGUGCCACCGAGAUU | AUCUCGGUGGCACUUGUCCU |
| | U (SEQ ID NO. 769) | U (SEQ ID NO. 770) |
| FNDC5.NM_153756-Pr-24′ | CUCCCAAAGCUGUGCUUAAU | UUAAGCACAGCUUUGGGAGU |
| | U (SEQ ID NO. 771) | U (SEQ ID NO. 772) |
| FNDC5.NM_153756-Pr-27′ | CAAAGCUGUGCUUAACUGAU | UCAGUUAAGCACAGCUUUGU |
| | U (SEQ ID NO. 773) | U (SEQ ID NO. 774) |
| FNDC5.NM_153756-Pr-30′ | GCAACCCUGUAAAGUCAUAU | UAUGACUUUACAGGGUUGCU |
| | U (SEQ ID NO. 775) | U (SEQ ID NO. 776) |

[0329] FNDC5 gene, also called FRCP2, is a gene in the fibronectin type III domain containing family. It encodes a transmembrane protein FNDC5. Irisin is a cleaved and secreted fragment of FNDC5 protein. Irisin is released from muscle cells during exercise and induces browning of white adipose tissue (Novelle, et al., Int J Endocrinol, vol. 2013:746281 (2013), the contents of which are incorporated herein by reference in their entirety). FNDC5 and irisin have great therapeutic potential in diabetes and obesity. They also involve in energy and metabolic homeostasis and affect the central nervous system (CNS).

[0330] In one embodiment, provided is a method of modulating FNDC5 or irisin protein levels, comprising administering FNDC5-saRNA of the present invention, wherein the FNDC5-saRNA targets an antisense RNA transcript ofFNDC5 gene. In one embodiment, FNDC5 or irisin protein level is increased by at least 20, 30, 40%, or at least 45, 50, 55, 60, 65, 70, 75%, or at least 80% in the presence of the FNDC5-saRNA of the present invention compared to FNDC5 or irisin protein level in the absence of the FNDC5-saRNA of the present invention. In a further embodiment, FNDC5 or irisin protein level is increased by a factor of at least 2, 3, 4, 5, 6, 7, 8, 9, 10, or by a factor of at least 15, 20, 25, 30, 35, 40, 45, 50, or by a factor of at least 60, 70, 80, 90, 100, in the presence of the FNDC5-saRNA of the present invention compared to FNDC5 or irisin protein level in the absence of the FNDC5-saRNA of the present invention.

[0331] In another embodiment, provided is a method of modulating browning of white adipose tissue comprising administering FNDC5-saRNA of the present invention, wherein the FNDC5-saRNA targets an antisense RNA transcript of FNDC5 gene.

[0332] In another embodiment, provided is a method of treating diabetes and obesity comprising administering FNDC5-saRNA of the present invention, wherein the FNDC5-saRNA targets an antisense RNA transcript of FNDC5 gene, wherein the symptoms of diabetes are reduced and the weight of the patient is reduced.

[0333] In one embodiment, the FNDC5-saRNA of the present invention is an antisense sequence such as, but not limited to, SEQ ID NO: 690, 692, 694, 696, 698, 700, 702, 704, 706, 708, 710, 712, 714, 716, 718, 720, 722, 724, 726, 728, 730, 732, 734, 736, 738, 740, 742, 744, 746, 748, 750, 752, 754, 756, 758, 760, 762, 764, 766, 768, 770, 772, 774, 776, 3398, 3400, 3402, 3404, 3406, 3408, 3410, 3412, 3414, 3416, 3418, 3420, 3422, 3424, 3426, 3428, 3430, 3432, 3434, 3436, 3438, 3440, 3442, 3444, 3446, 3448, 3450, 3452, 3454, 3456, 3458, 3460, 3462, 3464, 3466, 3468, 3470, 3472, 3474, 3476, 3478, 3480, 3482, 3484, 3486, 3488, 3490, 3492, 3494, 3496, 3498, 3500, 3502, 3504, 3506, 3508, 3510, 3512, 3514, 3516, 3518, 3520, 3522, 3524, 3526, 3528, 3530, 3532, 3534, 3536, 3538, 3540, 3542, 3544, 3546, 3548, 3550, 3552, 3554, 3556, 3558, 3560, 3562, 3564, 3566, 3568, 3570, 3572, 3574, 3576, 3578, 3580, 3582, 3584, 3586, 3588, 3590, 3592, 3594, 3596, and 3598. As a non-limiting example, these FNDC5-saRNA sequences may be used to modulate FNDC5 or irisin protein levels, modulate browning of white adipose tissue and/or treat diabetes and obesity.

[0334] In one embodiment, the APOA1-saRNA of the present invention is an saRNA duplex. The saRNA duplex may be a pair of sense and antisense sequences such as, but not limited to, SEQ ID NOs: 689 and 690; SEQ ID NOs: 691 and 692; SEQ ID NOs: 693 and 694; SEQ ID NOs: 695 and 696; SEQ ID NOs: 697 and 698; SEQ ID NOs: 699 and 700; SEQ ID NOs: 701 and 702; SEQ ID NOs: 703 and 704; SEQ ID NOs: 705 and 706; SEQ ID NOs: 707 and 708; SEQ ID NOs: 709 and 710; SEQ ID NOs: 711 and 712; SEQ ID NOs: 713 and 714; SEQ ID NOs: 715 and 716; SEQ ID NOs: 717 and 718; SEQ ID NOs: 719 and 720; SEQ ID NOs: 721 and 722; SEQ ID NOs: 723 and 724; SEQ ID NOs: 725 and 726; SEQ ID NOs: 727 and 728; SEQ ID NOs: 729 and 730; SEQ ID NOs: 731 and 732; SEQ ID NOs: 733 and 734; SEQ ID NOs: 735 and 736; SEQ ID NOs: 737 and 738; SEQ ID NOs: 739 and 740; SEQ ID NOs: 741 and 742; SEQ ID NOs: 743 and 744; SEQ ID NOs: 745 and 746; SEQ ID NOs: 747 and 748; SEQ ID NOs: 749 and 750; SEQ ID NOs: 751 and 752; SEQ ID NOs: 753 and 754; SEQ ID NOs: 755 and 756; SEQ ID NOs: 757 and 758; SEQ ID NOs: 759 and 760; SEQ ID NOs: 761 and 762; SEQ ID NOs: 763 and 764; SEQ ID NOs: 765 and 766; SEQ ID NOs: 767 and 768; SEQ ID NOs: 769 and 770; SEQ ID NOs: 771 and 772; SEQ ID NOs: 773 and 774; SEQ ID NOs: 775 and 776; SEQ ID NOs: 3397 and 3398; SEQ ID NOs: 3399 and 3400; SEQ ID NOs: 3401 and 3402; SEQ ID NOs: 3403 and 3404; SEQ ID NOs: 3405 and 3406; SEQ ID NOs: 3407 and 3408; SEQ ID NOs: 3409 and 3410; SEQ ID NOs: 3411 and 3412; SEQ ID NOs: 3413 and 3414; SEQ ID NOs: 3415 and 3416; SEQ ID NOs: 3417 and 3418; SEQ ID NOs: 3419 and 3420; SEQ ID NOs: 3421 and 3422; SEQ ID NOs: 3423 and 3424; SEQ ID NOs: 3425 and 3426; SEQ ID NOs: 3427 and 3428; SEQ ID NOs: 3429 and 3430; SEQ ID NOs: 3431 and 3432; SEQ ID NOs: 3433 and 3434; SEQ ID NOs: 3435 and 3436; SEQ ID NOs: 3437 and 3438; SEQ ID NOs: 3439 and 3440; SEQ ID NOs: 3441 and 3442; SEQ ID NOs: 3443 and 3444; SEQ ID NOs: 3445 and 3446; SEQ ID NOs: 3447 and 3448; SEQ ID NOs: 3449 and 3450; SEQ ID NOs: 3451 and 3452; SEQ ID NOs: 3453 and 3454; SEQ ID NOs: 3455 and 3456; SEQ ID NOs: 3457 and 3458; SEQ ID NOs: 3459 and 3460; SEQ ID NOs: 3461 and 3462; SEQ ID NOs: 3463 and 3464; SEQ ID NOs: 3465 and 3466; SEQ ID NOs: 3467 and 3468; SEQ ID NOs: 3469 and 3470; SEQ ID NOs: 3471 and 3472; SEQ ID NOs: 3473 and 3474; SEQ ID NOs: 3475 and 3476; SEQ ID NOs: 3477 and 3478; SEQ ID NOs: 3479 and 3480; SEQ ID NOs: 3481 and 3482; SEQ ID NOs: 3483 and 3484; SEQ ID NOs: 3485 and 3486; SEQ ID NOs: 3487 and 3488; SEQ ID NOs: 3489 and 3490; SEQ ID NOs: 3491 and 3492; SEQ ID NOs: 3493 and 3494; SEQ ID NOs: 3495 and 3496; SEQ ID NOs: 3497 and 3498; SEQ ID NOs: 3499 and 3500; SEQ ID NOs: 3501 and 3502; SEQ ID NOs: 3503 and 3504; SEQ ID NOs: 3505 and 3506; SEQ ID NOs: 3507 and 3508; SEQ ID NOs: 3509 and 3510; SEQ ID NOs: 3511 and 3512; SEQ ID NOs: 3513 and 3514; SEQ ID NOs: 3515 and 3516; SEQ ID NOs: 3517 and 3518; SEQ ID NOs: 3519 and 3520; SEQ ID NOs: 3521 and 3522; SEQ ID NOs: 3523 and 3524; SEQ ID NOs: 3525 and 3526; SEQ ID NOs: 3527 and 3528; SEQ ID NOs: 3529 and 3530; SEQ ID NOs: 3531 and 3532; SEQ ID NOs: 3533 and 3534; SEQ ID NOs: 3535 and 3536; SEQ ID NOs: 3537 and 3538; SEQ ID NOs: 3539 and 3540; SEQ ID NOs: 3541 and 3542; SEQ ID NOs: 3543 and 3544; SEQ ID NOs: 3545 and 3546; SEQ ID NOs: 3547 and 3548; SEQ ID NOs: 3549 and 3550; SEQ ID NOs: 3551 and 3552; SEQ ID NOs: 3553 and 3554; SEQ ID NOs: 3555 and 3556; SEQ ID NOs: 3557 and 3558; SEQ ID NOs: 3559 and 3560; SEQ ID NOs: 3561 and 3562; SEQ ID NOs: 3563 and 3564; SEQ ID NOs: 3565 and 3566; SEQ ID NOs: 3567 and 3568; SEQ ID NOs: 3569 and 3570; SEQ ID NOs: 3571 and 3572; SEQ ID NOs: 3573 and 3574; SEQ ID NOs: 3575 and 3576; SEQ ID NOs: 3577 and 3578; SEQ ID NOs: 3579 and 3580; SEQ ID NOs: 3581 and 3582; SEQ ID NOs: 3583 and 3584; SEQ ID NOs: 3585 and 3586; SEQ ID NOs: 3587 and 3588; SEQ ID NOs: 3589 and 3590; SEQ ID NOs: 3591 and 3592; SEQ ID NOs: 3593 and 3594; SEQ ID NOs: 3595 and 3596; SEQ ID NOs: 3597 and 3598. As a non-limiting example, these FNDC5-saRNA sequences which are saRNA duplexes may be used to modulate FNDC5 or irisin protein levels, modulate browning of white adipose tissue and/or treat diabetes and obesity.

### FOXA2 Gene

[0335] As another non-limiting example, provided is a method of modulating the expression of FOXA2 gene comprising administering saRNA of the present invention, wherein the saRNA targets an antisense RNA transcript of FOXA2 gene. These saRNAs are called FOXA2-saRNA. In one embodiment, the expression of FOXA2 gene is increased by at least 20, 30, 40%, or at least 45, 50, 55, 60, 65, 70, 75%, or at least 80% in the presence of the FOXA2-saRNA of the present invention compared to the expression of FOXA2 gene in the absence of the FOXA2-saRNA of the present invention. In a further embodiment, the expression of FOXA2 gene is increased by a factor of at least 2, 3, 4, 5, 6, 7, 8, 9, 10, or by a factor of at least 15, 20, 25, 30, 35, 40, 45, 50, or by a factor of at least 60, 70, 80, 90, 100, in the presence of the FOXA2-saRNA of the present invention compared to the expression of FOXA2 gene in the absence of the FOXA2-saRNA of the present invention. The modulation of the expression of FOXA2 gene may be reflected or determined by the change of FOXA2 mRNA levels.

[0336] FOXA2-saRNAs may be single-stranded and comprise 14-30 nucleotides. The sequence of a single-stranded FOXA2-saRNA may have at least 60%, 70%, 80% or 90% identity with a sequence selected from the sequences of the antisense strands in Table 16-2. In one embodiment, the single-stranded saRNA comprises a sequence selected from the sequences of the antisense strands in Table 16-2. In one embodiment, the single-stranded FOXA2-saRNA may have a 3′ tail. The sequence of a single-stranded FOXA2-saRNA with a 3′ tail may have at least 60%, 70%, 80% or 90% identity with a sequence selected from the sequences of the antisense strands in Table 17. In one embodiment, the single-stranded saRNA comprises a sequence selected from the sequences of the antisense strands in Table 17.

[0337] FOXA2-saRNAs may be double-stranded. The two strands form a duplex and each strand comprises 14-30 nucleotides. The first strand of a double-stranded FOXA2-saRNA may have at least 60%, 70%, 80% or 90% identity with a sequence selected from the sequences of the antisense strands in Table 16-2. In one embodiment, the first strand of the double-stranded saRNA comprises a sequence selected from the sequences of the antisense strands in Table 16-2. The second strand of a double-stranded FOXA2-saRNA may have at least 60%, 70%, 80% or 90% identity with a sequence selected from the sequences of the sense strands in Table 16-2. In one embodiment, the second strand of the double-stranded saRNA comprises a sequence selected from the sequences of the sense strands in Table 16-2. In one embodiment, the double-stranded FOXA2-saRNA may have a 3′ overhang on each strand. The first strand of a double-stranded FOXA2-saRNA may have at least 60%, 70%, 80% or 90% identity with a sequence selected from the sequences of the antisense strands in Table 17. In one embodiment, the first strand of the double-stranded saRNA comprises a sequence selected from the sequences of the antisense strands in Table 17. The second strand of a double-stranded FOXA2-saRNA may have at least 60%, 70%, 80% or 90% identity with a sequence selected from the sequences of the sense strands in Table 17. In one embodiment, the second strand of the double-stranded saRNA comprises a sequence selected from the sequences of the sense strands in Table 17.

[0338] FOXA2-saRNA may be modified or unmodified.

[0339] Table 16-1 describes the target gene, the targeted sequence, the genomic location of the targeted sequence and the relative location of FOXA2-saRNAs with no 3′ overhang. In Table 16-1, the targeted sequence is defined as a region on the template strand of the target gene which is identical to a region on the target antisense RNA transcript to which the antisense strand of an saRNA hybridizes. In Table 16-1, the relative location is the distance from the 5′ end of the targeted sequence to the TSS. A negative number represents a location upstream of the TSS and a positive number represents a location downstream of the TSS.

TABLE 16-1
Sequences of FOXA2-saRNAs (with no 3′ overhang)

| | Target | | Genomic Location of the | Relative |
|---|---|---|---|---|
| saRNA ID | Gene | Targeted sequence | Targeted sequence | Location |
| FOXA2.NM_021784- | FOXA2 | gcgctgtcctatttagaaa | chr20: 22565879 plus strand | −778 |
| Pr-1 | human | (SEQ ID NO. 777) | | |
| FOXA2.NM_021784- | FOXA2 | ccggcagatccctatgaaa | chr20: 22565776 plus strand | −675 |
| Pr-3 | human | (SEQ ID NO. 778) | | |
| FOXA2.NM_021784- | FOXA2 | ctatgaaagccggatttat | chr20: 22565787 plus strand | −686 |
| Pr-4 | human | (SEQ ID NO. 779) | | |
| FOXA2.NM_021784- | FOXA2 | acataactctgttaggata | chr20: 22564549 plus strand | 552 |
| Pr-6 | human | (SEQ ID NO. 780) | | |
| FOXA2.NM_021784- | FOXA2 | agcgctgtcctatttagaa | chr20: 22565878 plus strand | −777 |
| Pr-7 | human | (SEQ ID NO. 781) | | |
| FOXA2.NM_021784- | FOXA2 | aatattatctcaaggctaa | chr20: 22564631 plus strand | 470 |
| Pr-13 | human | (SEQ ID NO. 782) | | |
| FOXA2.NM_021784- | FOXA2 | ctaacagtgtgtcgtataa | chr20: 22564646 plus strand | 455 |
| Pr-16 | human | (SEQ ID NO. 783) | | |
| FOXA2.NM_021784- | FOXA2 | gccgcaagtcaatatttga | chr20: 22564602 plus strand | 499 |
| Pr-23 | human | (SEQ ID NO. 784) | | |
| FOXA2.NM_021784- | FOXA2 | cctatgaaagccggattta | chr20: 22565786 plus strand | −685 |
| Pr-29 | human | (SEQ ID NO. 785) | | |
| FOXA2.NM_021784- | FOXA2 | aagtcaatatttgatcaca | chr20: 22564607 plus strand | 494 |
| Pr-30 | human | (SEQ ID NO. 786) | | |
| FOXA2.NM_021784- | FOXA2 | gctgagctttgcaggcaaa | chr20: 22564394 plus strand | 707 |
| Pr-33 | human | (SEQ ID NO. 787) | | |
| FOXA2.NM_021784- | FOXA2 | ggcagatccctatgaaagc | chr20: 22565778 plus strand | −677 |
| Pr-35 | human | (SEQ ID NO. 788) | | |
| FOXA2.NM_021784- | FOXA2 | gggtttcttcgctctcagt | chr20: 22565813 plus strand | −712 |
| Pr-36 | human | (SEQ ID NO. 789) | | |
| FOXA2.NM_021784- | FOXA2 | tgcaaagcgctgtcctatt | chr20: 22565873 plus strand | −772 |
| Pr-37 | human | (SEQ ID NO. 790) | | |
| FOXA2.NM_021784- | FOXA2 | gaaagccggatttatttat | chr20: 22565791 plus strand | −690 |
| Pr-39 | human | (SEQ ID NO. 791) | | |
| FOXA2.NM_153675- | FOXA2 | tgagatttgtctctgatat | chr20: 22566114 plus strand | −13 |
| Pr-5 | human | (SEQ ID NO. 792) | | |
| FOXA2.NM_153675- | FOXA2 | gcgctgtcctatttagaaa | chr20: 22565879 plus strand | 222 |
| Pr-6 | human | (SEQ ID NO. 793) | | |
| FOXA2.NM_153675- | FOXA2 | ccggcagatccctatgaaa | chr20: 22565776 plus strand | 325 |
| Pr-8 | human | (SEQ ID NO. 794) | | |
| FOXA2.NM_153675- | FOXA2 | ctatgaaagccggatttat | chr20: 22565787 plus strand | 314 |
| Pr-9 | human | (SEQ ID NO. 795) | | |
| FOXA2.NM_153675- | FOXA2 | ggactgcttaatagaaatt | chr20: 22566315 plus strand | −214 |
| Pr-12 | human | (SEQ ID NO. 796) | | |
| FOXA2.NM_153675- | FOXA2 | agcgctgtcctatttagaa | chr20: 22565878 plus strand | 223 |
| Pr-13 | human | (SEQ ID NO. 797) | | |
| FOXA2.NM_153675- | FOXA2 | agaagaatccaggaatcaa | chr20: 22566239 plus strand | −138 |
| Pr-19 | human | (SEQ ID NO. 798) | | |
| FOXA2.NM_153675- | FOXA2 | ggcgggattctcccacaaa | chr20: 22566838 plus strand | −737 |
| Pr-21 | human | (SEQ ID NO. 799) | | |
| FOXA2.NM_153675- | FOXA2 | cacagcatttcgtaactaa | chr20: 22566181 plus strand | −80 |
| Pr-26 | human | (SEQ ID NO. 800) | | |
| FOXA2.NM_153675- | FOXA2 | agagggactgcttaataga | chr20: 22566311 plus strand | −210 |
| Pr-32 | human | (SEQ ID NO. 801) | | |
| FOXA2.NM_153675- | FOXA2 | agatttgtctctgatattc | chr20: 22566116 plus strand | −15 |
| Pr-40 | human | (SEQ ID NO. 802) | | |

TABLE 16-2
Sequences of FOXA2-saRNAs (with no 3' overhang)

| | | Sense | | Antisense |
|---|---|---|---|---|
| saRNA ID | Sense (passenger) | SEQ ID | Antisense (guide) | SEQ ID |
| FOXA2.NM_021784- | GCGCUGUCCUAUUUAG | 803 | UUUCUAAAUAGGACAG | 804 |
| Pr-1 | AAA | | CGC | |
| FOXA2.NM_021784- | CCGGCAGAUCCCUAUG | 805 | UUUCAUAGGGAUCUGCC | 806 |
| Pr-3 | AAA | | GG | |
| FOXA2.NM_021784- | CUAUGAAAGCCGGAUU | 807 | AUAAAUCCGGCUUUCAU | 808 |
| Pr-4 | UAU | | AG | |
| FOXA2.NM_021784- | ACAUAACUCUGUUAGG | 809 | UAUCCUAACAGAGUUA | 810 |
| Pr-6 | AUA | | UGU | |
| FOXA2.NM_021784- | AGCGCUGUCCUAUUUA | 811 | UUCUAAAUAGGACAGC | 812 |
| Pr-7 | GAA | | GCU | |
| FOXA2.NM_021784- | AAUAUUAUCUCAAGGC | 813 | UUAGCCUUGAGAUAAU | 814 |
| Pr-13 | UAA | | AUU | |
| FOXA2.NM_021784- | CUAACAGUGUGUCGUA | 815 | UUAUACGACACACUGUU | 816 |
| Pr-16 | UAA | | AG | |
| FOXA2.NM_021784- | GCCGCAAGUCAAUAUU | 817 | UCAAAUAUUGACUUGC | 818 |
| Pr-23 | UGA | | GGC | |
| FOXA2.NM_021784- | CCUAUGAAAGCCGGAU | 819 | UAAAUCCGGCUUUCAUA | 820 |
| Pr-29 | UUA | | GG | |
| FOXA2.NM_021784- | AAGUCAAUAUUUGAUC | 821 | UGUGAUCAAAUAUUGA | 822 |
| Pr-30 | ACA | | CUU | |
| FOXA2.NM_021784- | GCUGAGCUUUGCAGGC | 823 | UUUGCCUGCAAAGCUCA | 824 |
| Pr-33 | AAA | | GC | |
| FOXA2.NM_021784- | GGCAGAUCCCUAUGAA | 825 | GCUUUCAUAGGGAUCU | 826 |
| Pr-35 | AGC | | GCC | |
| FOXA2.NM_021784- | GGGUUUCUUCGCUCUC | 827 | ACUGAGAGCGAAGAAA | 828 |
| Pr-36 | AGU | | CCC | |
| FOXA2.NM_021784- | UGCAAAGCGCUGUCCU | 829 | AAUAGGACAGCGCUUU | 830 |
| Pr-37 | AUU | | GCA | |
| FOXA2.NM_021784- | GAAAGCCGGAUUUAUU | 831 | AUAAAUAAAUCCGGCU | 832 |
| Pr-39 | UAU | | UUC | |
| FOXA2.NM_153675- | UGAGAUUUGUCUCUGA | 833 | AUAUCAGAGACAAAUC | 834 |
| Pr-5 | UAU | | UCA | |
| FOXA2.NM_153675- | GCGCUGUCCUAUUUAG | 835 | UUUCUAAAUAGGACAG | 836 |
| Pr-6 | AAA | | CGC | |
| FOXA2.NM_153675- | CCGGCAGAUCCCUAUG | 837 | UUUCAUAGGGAUCUGCC | 838 |
| Pr-8 | AAA | | GG | |
| FOXA2.NM_153675- | CUAUGAAAGCCGGAUU | 839 | AUAAAUCCGGCUUUCAU | 840 |
| Pr-9 | UAU | | AG | |
| FOXA2.NM_153675- | GGACUGCUUAAUAGAA | 841 | AAUUUCUAUUAAGCAG | 842 |
| Pr-12 | AUU | | UCC | |
| FOXA2.NM_153675- | AGCGCUGUCCUAUUUA | 843 | UUCUAAAUAGGACAGC | 844 |
| Pr-13 | GAA | | GCU | |
| FOXA2.NM_153675- | AGAAGAAUCCAGGAAU | 845 | UUGAUUCCUGGAUUCU | 846 |
| Pr-19 | CAA | | UCU | |
| FOXA2.NM_153675- | GGCGGGAUUCUCCCAC | 847 | UUUGUGGGAGAAUCCC | 848 |
| Pr-21 | AAA | | GCC | |
| FOXA2.NM_153675- | CACAGCAUUUCGUAAC | 849 | UUAGUUACGAAAUGCU | 850 |
| Pr-26 | UAA | | GUG | |
| FOXA2.NM_153675- | AGAGGGACUGCUUAAU | 851 | UCUAUUAAGCAGUCCCU | 852 |
| Pr-32 | AGA | | CU | |
| FOXA2.NM_153675- | AGAUUUGUCUCUGAUA | 853 | GAAUAUCAGAGACAAA | 854 |
| Pr-40 | UUC | | UCU | |

TABLE 17
Sequences of FOXA2-saRNAs (with 3′ overhang)

| | | Sense | | Antisense |
|---|---|---|---|---|
| | | SEQ | | SEQ |
| saRNA ID | Sense (passenger) | ID | Antisense (guide) | ID |
| FOXA2.NM_021784- | GCGCUGUCCUAUUUA | 855 | UUUCUAAAUAGGACAG | 856 |
| Pr-1′ | GAAAUU | | CGCUU | |
| FOXA2.NM_021784- | CCGGCAGAUCCCUAU | 857 | UUUCAUAGGGAUCUGC | 858 |
| Pr-3′ | GAAAUU | | CGGUU | |
| FOXA2.NM_021784- | CUAUGAAAGCCGGA | 859 | AUAAAUCCGGCUUUCA | 860 |
| Pr-4′ | UUUAUUU | | UAGUU | |
| FOXA2.NM_021784- | ACAUAACUCUGUUA | 861 | UAUCCUAACAGAGUUA | 862 |
| Pr-6′ | GGAUAUU | | UGUUU | |
| FOXA2.NM_021784- | AGCGCUGUCCUAUUU | 863 | UUCUAAAUAGGACAGC | 864 |
| Pr-7′ | AGAAUU | | GCUUU | |
| FOXA2.NM_021784- | AAUAUUAUCUCAAG | 865 | UUAGCCUUGAGAUAAU | 866 |
| Pr-13′ | GCUAAUU | | AUUUU | |
| FOXA2.NM_021784- | CUAACAGUGUGUCG | 867 | UUAUACGACACACUGU | 868 |
| Pr-16′ | UAUAAUU | | UAGUU | |
| FOXA2.NM_021784- | GCCGCAAGUCAAUAU | 869 | UCAAAUAUUGACUUGC | 870 |
| Pr-23′ | UUGAUU | | GGCUU | |
| FOXA2.NM_021784- | CCUAUGAAAGCCGGA | 871 | UAAAUCCGGCUUUCAU | 872 |
| Pr-29′ | UUUAUU | | AGGUU | |
| FOXA2.NM_021784- | AAGUCAAUAUUUGA | 873 | UGUGAUCAAAUAUUGA | 874 |
| Pr-30′ | UCACAUU | | CUUUU | |
| FOXA2.NM_021784- | GCUGAGCUUUGCAG | 875 | UUUGCCUGCAAAGCUC | 876 |
| Pr-33′ | GCAAAUU | | AGCUU | |
| FOXA2.NM_021784- | GGCAGAUCCCUAUGA | 877 | GCUUUCAUAGGGAUCU | 878 |
| Pr-35′ | AAGCUU | | GCCUU | |
| FOXA2.NM_021784- | GGGUUUCUUCGCUCU | 879 | ACUGAGAGCGAAGAAA | 880 |
| Pr-36′ | CAGUUU | | CCCUU | |
| FOXA2.NM_021784- | UGCAAAGCGCUGUCC | 881 | AAUAGGACAGCGCUUU | 882 |
| Pr-37′ | UAUUUU | | GCAUU | |
| FOXA2.NM_021784- | GAAAGCCGGAUUUA | 883 | AUAAAUAAAUCCGGCU | 884 |
| Pr-39′ | UUUAUUU | | UUCUU | |
| FOXA2.NM_153675- | UGAGAUUUGUCUCU | 885 | AUAUCAGAGACAAAUC | 886 |
| Pr-5′ | GAUAUUU | | UCAUU | |
| FOXA2.NM_153675- | GCGCUGUCCUAUUUA | 887 | UUUCUAAAUAGGACAG | 888 |
| Pr-6′ | GAAAUU | | CGCUU | |
| FOXA2.NM_153675- | CCGGCAGAUCCCUAU | 889 | UUUCAUAGGGAUCUGC | 890 |
| Pr-8′ | GAAAUU | | CGGUU | |
| FOXA2.NM_153675- | CUAUGAAAGCCGGA | 891 | AUAAAUCCGGCUUUCA | 892 |
| Pr-9′ | UUUAUUU | | UAGUU | |
| FOXA2.NM_153675- | GGACUGCUUAAUAG | 893 | AAUUUCUAUUAAGCAG | 894 |
| Pr-12′ | AAAUUUU | | UCCUU | |
| FOXA2.NM_153675- | AGCGCUGUCCUAUUU | 895 | UUCUAAAUAGGACAGC | 896 |
| Pr-13′ | AGAAUU | | GCUUU | |
| FOXA2.NM_153675- | AGAAGAAUCCAGGA | 897 | UUGAUUCCUGGAUUCU | 898 |
| Pr-19′ | AUCAAUU | | UCUUU | |
| FOXA2.NM_153675- | GGCGGGAUUCUCCCA | 899 | UUUGUGGGAGAAUCCC | 900 |
| Pr-21′ | CAAAUU | | GCCUU | |
| FOXA2.NM_153675- | CACAGCAUUUCGUAA | 901 | UUAGUUACGAAAUGCU | 902 |
| Pr-26′ | CUAAUU | | GUGUU | |
| FOXA2.NM_153675- | AGAGGGACUGCUUA | 903 | UCUAUUAAGCAGUCCC | 904 |
| Pr-32′ | AUAGAUU | | UCUUU | |
| FOXA2.NM_153675- | AGAUUUGUCUCUGA | 905 | GAAUAUCAGAGACAAA | 906 |
| Pr-40′ | UAUUCUU | | UCUUU | |

[0340] FOXA2 gene, also called HNF3G, encodes a member of the forkhead class of DNA-binding proteins. It is a transcription factor that is involved in embryonic development, establishment of tissue-specific gene expression and regulation of gene expression in differentiated tissues. FOXA2 is a transcriptional activator for liver-specific genes such as albumin, transthyretin, and tyrosine aminotransferase. It also interacts with chromatin and regulates the expression of genes for glucose sensing in pancreatic beta-cells and glucose homeostasis (Wang et al., J. Biol. Chem., vol. 277:17564 (2002), the contents of which are incorporated herein by reference in their entirety). It also regulates fat metabolism, binds to fibrinogen beta promoter and is involved in IL6-induced fibrinogen beta transcriptional activation. Diseases associated with FOXA2 include Meckel's diverticulum, and maturity-onset diabetes of the young.

[0341] In one embodiment, provided is a method of modulating FOXA2 protein levels comprising administering FOXA2-saRNA of the present invention, wherein the FOXA2-saRNA targets an antisense RNA transcript of FOXA2 gene. In one embodiment, FOXA2 protein level is increased by at least 20, 30, 40%, or at least 45, 50, 55, 60, 65, 70, 75%, or at least 80% in the presence of the FOXA2-saRNA of the present invention compared to FOXA2 protein level in the absence of the FOXA2-saRNA of the present invention. In a further embodiment, FOXA2 protein level is increased by a factor of at least 2, 3, 4, 5, 6, 7, 8, 9, 10, or by a factor of at least 15, 20, 25, 30, 35, 40, 45, 50, or by a factor of at least 60, 70, 80, 90, 100, in the presence of the FOXA2-saRNA of the present invention compared to FOXA2 protein level in the absence of the FOXA2-saRNA of the present invention.

[0342] In another embodiment, provided is a method of modulating glucose sensing or glucose homeostasis, comprising administering FOXA2-saRNA of the present invention, wherein the FOXA2-saRNA targets an antisense RNA transcript of FOXA2 gene.

[0343] In another embodiment, provided is a method of treating Meckel's diverticulum or maturity-onset diabetes of the young, comprising administering FOXA2-saRNA of the present invention, wherein the FOXA2-saRNA targets an antisense RNA transcript of FOXA2 gene.

[0344] In one embodiment, the FOXA2-saRNA of the present invention is an antisense sequence such as, but not limited to, SEQ ID NO: 804, 806, 808, 810, 812, 814, 816, 818, 820, 822, 824, 826, 828, 830, 832, 834, 836, 838, 840, 842, 844, 846, 848, 850, 852, 854, 856, 858, 860, 862, 864, 866, 868, 870, 872, 874, 876, 878, 880, 882, 884, 886, 888, 890, 892, 894, 896, 898, 900, 902, 904, 3600, 3602, 3604, 3606, 3608, 3610, 3612, 3614, 3616, 3618, 3620, 3622, 3624, 3626, 3628, 3630, 3632, 3634, 3636, 3638, 3640, 3642, 3644, 3646, 3648, 3650, 3652, 3654, 3656, 3658, 3660, 3662, 3664, 3666, 3668, 3670, 3672, 3674, 3676, 3678, 3680, 3682, 3684, 3686, 3688, 3690, 3692, 3694, 3696, 3698, 3700, 3702, 3704, 3706, 3708, 3710, 3712, 3714, 3716, 3718, 3720, 3722, 3724, 3726, 3728, 3730, 3732, 3734, 3736, 3738, 3740, 3742, 3744, 3746, 3748, 3750, 3752, 3754, 3756, 3758 and 3760. As a non-limiting example, these FOXA2-saRNA sequences may be used to modulate FOXA2 protein levels, modulating glucose sensing or glucose homeostasis and/or treating Meckel's diverticulum or maturity-onset diabetes of the young.

[0345] In one embodiment, the FOXA2-saRNA of the present invention is an saRNA duplex. The saRNA duplex may be a pair of sense and antisense sequences such as, but not limited to, SEQ ID NOs: 803 and 804; SEQ ID NOs: 805 and 806; SEQ ID NOs: 807 and 808; SEQ ID NOs: 809 and 810; SEQ ID NOs: 811 and 812; SEQ ID NOs: 813 and 814; SEQ ID NOs: 815 and 816; SEQ ID NOs: 817 and 818; SEQ ID NOs: 819 and 820; SEQ ID NOs: 821 and 822; SEQ ID NOs: 823 and 824; SEQ ID NOs: 825 and 826; SEQ ID NOs: 827 and 828; SEQ ID NOs: 829 and 830; SEQ ID NOs: 831 and 832; SEQ ID NOs: 833 and 834; SEQ ID NOs: 835 and 836; SEQ ID NOs: 837 and 838; SEQ ID NOs: 839 and 840; SEQ ID NOs: 841 and 842; SEQ ID NOs: 843 and 844; SEQ ID NOs: 845 and 846; SEQ ID NOs: 847 and 848; SEQ ID NOs: 849 and 850; SEQ ID NOs: 851 and 852; SEQ ID NOs: 853 and 854; SEQ ID NOs: 855 and 856; SEQ ID NOs: 857 and 858; SEQ ID NOs: 859 and 860; SEQ ID NOs: 861 and 862; SEQ ID NOs: 863 and 864; SEQ ID NOs: 865 and 866; SEQ ID NOs: 867 and 868; SEQ ID NOs: 869 and 870; SEQ ID NOs: 871 and 872; SEQ ID NOs: 873 and 874; SEQ ID NOs: 875 and 876; SEQ ID NOs: 877 and 878; SEQ ID NOs: 879 and 880; SEQ ID NOs: 881 and 882; SEQ ID NOs: 883 and 884; SEQ ID NOs: 885 and 886; SEQ ID NOs: 887 and 888; SEQ ID NOs: 889 and 890; SEQ ID NOs: 891 and 892; SEQ ID NOs: 893 and 894; SEQ ID NOs: 895 and 896; SEQ ID NOs: 897 and 898; SEQ ID NOs: 899 and 900; SEQ ID NOs: 901 and 902; SEQ ID NOs: 903 and 904; SEQ ID NOs: 3599 and 3600; SEQ ID NOs: 3601 and 3602; SEQ ID NOs: 3603 and 3604; SEQ ID NOs: 3605 and 3606; SEQ ID NOs: 3607 and 3608; SEQ ID NOs: 3609 and 3610; SEQ ID NOs: 3611 and 3612; SEQ ID NOs: 3613 and 3614; SEQ ID NOs: 3615 and 3616; SEQ ID NOs: 3617 and 3618; SEQ ID NOs: 3619 and 3620; SEQ ID NOs: 3621 and 3622; SEQ ID NOs: 3623 and 3624; SEQ ID NOs: 3625 and 3626; SEQ ID NOs: 3627 and 3628; SEQ ID NOs: 3629 and 3630; SEQ ID NOs: 3631 and 3632; SEQ ID NOs: 3633 and 3634; SEQ ID NOs: 3635 and 3636; SEQ ID NOs: 3637 and 3638; SEQ ID NOs: 3639 and 3640; SEQ ID NOs: 3641 and 3642; SEQ ID NOs: 3643 and 3644; SEQ ID NOs: 3645 and 3646; SEQ ID NOs: 3647 and 3648; SEQ ID NOs: 3649 and 3650; SEQ ID NOs: 3651 and 3652; SEQ ID NOs: 3653 and 3654; SEQ ID NOs: 3655 and 3656; SEQ ID NOs: 3657 and 3658; SEQ ID NOs: 3659 and 3660; SEQ ID NOs: 3661 and 3662; SEQ ID NOs: 3663 and 3664; SEQ ID NOs: 3665 and 3666; SEQ ID NOs: 3667 and 3668; SEQ ID NOs: 3669 and 3670; SEQ ID NOs: 3671 and 3672; SEQ ID NOs: 3673 and 3674; SEQ ID NOs: 3675 and 3676; SEQ ID NOs: 3677 and 3678; SEQ ID NOs: 3679 and 3680; SEQ ID NOs: 3681 and 3682; SEQ ID NOs: 3683 and 3684; SEQ ID NOs: 3685 and 3686; SEQ ID NOs: 3687 and 3688; SEQ ID NOs: 3689 and 3690; SEQ ID NOs: 3691 and 3692; SEQ ID NOs: 3693 and 3694; SEQ ID NOs: 3695 and 3696; SEQ ID NOs: 3697 and 3698; SEQ ID NOs: 3699 and 3700; SEQ ID NOs: 3701 and 3702; SEQ ID NOs: 3703 and 3704; SEQ ID NOs: 3705 and 3706; SEQ ID NOs: 3707 and 3708; SEQ ID NOs: 3709 and 3710; SEQ ID NOs: 3711 and 3712; SEQ ID NOs: 3713 and 3714; SEQ ID NOs: 3715 and 3716; SEQ ID NOs: 3717 and 3718; SEQ ID NOs: 3719 and 3720; SEQ ID NOs: 3721 and 3722; SEQ ID NOs: 3723 and 3724; SEQ ID NOs: 3725 and 3726; SEQ ID NOs: 3727 and 3728; SEQ ID NOs: 3729 and 3730; SEQ ID NOs: 3731 and 3732; SEQ ID NOs: 3733 and 3734; SEQ ID NOs: 3735 and 3736; SEQ ID NOs: 3737 and 3738; SEQ ID NOs: 3739 and 3740; SEQ ID NOs: 3741 and 3742; SEQ ID NOs: 3743 and 3744; SEQ ID NOs: 3745 and 3746; SEQ ID NOs: 3747 and 3748; SEQ ID NOs: 3749 and 3750; SEQ ID NOs: 3751 and 3752; SEQ ID NOs: 3753 and 3754; SEQ ID NOs: 3755 and 3756; SEQ ID NOs: 3757 and 3758; SEQ ID NOs: 3759 and 3760. As a non-limiting example, these FOXA2-saRNA sequences which are saRNA duplexes may be used to modulate FOXA2 protein levels, modulating glucose sensing or glucose homeostasis and/or treating Meckel's diverticulum or maturity-onset diabetes of the young.

### FOXP3 Gene

[0346] As another non-limiting example, provided is a method of modulating the expression of FOXP3 gene comprising administering saRNA of the present invention, wherein the saRNA targets an antisense RNA transcript of FOXP3 gene. These saRNAs are called FOXP3-saRNA. In one embodiment, the expression of FOXP3 gene is increased by at least 20, 30, 40%, or at least 45, 50, 55, 60, 65, 70, 75%, or at least 80% in the presence of the FOXP3-saRNA of the present invention compared to the expression of FOXP3 gene in the absence of the FOXP3-saRNA of the present invention. In a further embodiment, the expression of FOXP3 gene is increased by a factor of at least 2, 3, 4, 5, 6, 7, 8, 9, 10, or by a factor of at least 15, 20, 25, 30, 35, 40, 45, 50, or by a factor of at least 60, 70, 80, 90, 100, in the presence of the FOXP3-saRNA of the present invention compared to the expression of FOXP3 gene in the absence of the FOXP3-saRNA of the present invention. The modulation of the expression of FOXP3 gene may be reflected or determined by the change of FOXP3 mRNA levels.

[0347] FOXP3-saRNAs may be single-stranded and comprise 14-30 nucleotides. The sequence of a single-stranded FOXP3-saRNA may have at least 60%, 70%, 80% or 90% identity with a sequence selected from the sequences of the antisense strands in Table 18-2. In one embodiment, the single-stranded saRNA comprises a sequence selected from the sequences of the antisense strands in Table 18-2. In one embodiment, the single-stranded FOXP3-saRNA may have a 3′ tail. The sequence of a single-stranded FOXP3-saRNA with a 3′ tail may have at least 60%, 70%, 80% or 90% identity with a sequence selected from the sequences of the antisense strands in Table 19. In one embodiment, the single-stranded saRNA comprises a sequence selected from the sequences of the antisense strands in Table 19.

[0348] FOXP3-saRNAs may be double-stranded. The two strands form a duplex and each strand comprises 14-30 nucleotides. The first strand of a double-stranded FOXP3-saRNA may have at least 60%, 70%, 80% or 90% identity with a sequence selected from the sequences of the antisense strands in Table 18-2. In one embodiment, the first strand of the double-stranded saRNA comprises a sequence selected from the sequences of the antisense strands in Table 18-2. The second strand of a double-stranded FOXP3-saRNA may have at least 60%, 70%, 80% or 90% identity with a sequence selected from the sequences of the sense strands in Table 18-2. In one embodiment, the second strand of the double-stranded saRNA comprises a sequence selected from the sequences of the sense strands in Table 18-2. In one embodiment, the double-stranded FOXP3-saRNA may have a 3′ overhang on each strand. The first strand of a double-stranded FOXP3-saRNA may have at least 60%, 70%, 80% or 90% identity with a sequence selected from the sequences of the antisense strands in Table 19. In one embodiment, the first strand of the double-stranded saRNA comprises a sequence selected from the sequences of the antisense strands in Table 19. The second strand of a double-stranded FOXP3-saRNA may have at least 60%, 70%, 80% or 90% identity with a sequence selected from the sequences of the sense strands in Table 19. In one embodiment, the second strand of the double-stranded saRNA comprises a sequence selected from the sequences of the sense strands in Table 19.

[0349] FOXP3-saRNAs may be modified or unmodified.

[0350] Table 18-1 describes the target gene, the targeted sequence, the genomic location of the targeted sequence and the relative location of FOXP3-saRNAs with no 3′ overhang. In Table 18-1, the targeted sequence is defined as a region on the template strand of the target gene which is identical to a region on the target antisense RNA transcript to which the antisense strand of an saRNA hybridizes. In Table 18-1, the relative location is the distance from the 5′ end of the targeted sequence to the TSS. A negative number represents a location upstream of the TSS and a positive number represents a location downstream of the TSS.

TABLE 18-1
Sequences of FOXP3-saRNAs (with no 3′ overhang)

| | | | Targeted | | |
|---|---|---|---|---|---|
| | Target | | sequence | Genomic Location of the | Relative |
| saRNA ID | Gene | Targeted sequence | ID | Targeted sequence | Location |
| FOXP3.NM_014009- | FOXP3 | taatagggctcatgagaaa | 907 | chrX: 49121476 plus | −188 |
| Pr-15 | human | | | strand | |
| FOXP3.NM_014009- | FOXP3 | ctacgtatcaattgatgaa | 908 | chrX: 49120882 plus | 406 |
| Pr-19 | human | | | strand | |
| FOXP3.NM_014009- | FOXP3 | tcttgattatgagacttaa | 909 | chrX: 49121356 plus | −68 |
| Pr-21 | human | | | strand | |
| FOXP3.NM_014009- | FOXP3 | agaggtgagaggtatcaat | 910 | chrX: 49121453 plus | −165 |
| Pr-23 | human | | | strand | |
| FOXP3.NM_014009- | FOXP3 | acttgaagagtcggagaat | 911 | chrX: 49121898 plus | −610 |
| Pr-29 | human | | | strand | |
| FOXP3.NM_014009- | FOXP3 | gaacatgtctcacaagtga | 912 | chrX: 49122268 plus | −980 |
| Pr-34 | human | | | strand | |
| FOXP3.NM_014009- | FOXP3 | ggtctcctctaaagcgata | 913 | chrX: 49120326 plus | 962 |
| Pr-40 | human | | | strand | |

TABLE 18-2
Sequences of FOXP3-saRNAs (with no 3′ overhang)

| | | Sense | | Anti-sense |
|---|---|---|---|---|
| saRNA ID | Sense (passenger) | SEQ ID | Antisense (guide) | SEQ ID |
| FOXP3.NM_014009- | UAAUAGGGCUCAUGAG | 914 | UUUCUCAUGAGCCCUA | 915 |
| Pr-15 | AAA | | UUA | |
| FOXP3.NM_014009- | CUACGUAUCAAUUGAU | 916 | UUCAUCAAUUGAUACG | 917 |
| Pr-19 | GAA | | UAG | |
| FOXP3.NM_014009- | UCUUGAUUAUGAGACU | 918 | UUAAGUCUCAUAAUCA | 919 |
| Pr-21 | UAA | | AGA | |
| FOXP3.NM_014009- | AGAGGUGAGAGGUAUC | 920 | AUUGAUACCUCUCACCU | 921 |
| Pr-23 | AAU | | CU | |
| FOXP3.NM_014009- | ACUUGAAGAGUCGGAG | 922 | AUUCUCCGACUCUUCAA | 923 |
| Pr-29 | AAU | | GU | |
| FOXP3.NM_014009- | GAACAUGUCUCACAAG | 924 | UCACUUGUGAGACAUG | 925 |
| Pr-34 | UGA | | UUC | |
| FOXP3.NM_014009- | GGUCUCCUCUAAAGCG | 926 | UAUCGCUUUAGAGGAG | 927 |
| Pr-40 | AUA | | ACC | |

TABLE 19
Sequences of FOXP3-saRNAs (with 3′ overhang)

| | | Sense | | Antisense |
|---|---|---|---|---|
| saRNA ID | Sense (passenger) | SEQ ID | Antisense (guide) | SEQ ID |
| FOXP3.NM_014009- | UAAUAGGGCUCAUG | 928 | UUUCUCAUGAGCCCUAUU | 929 |
| Pr-15′ | AGAAAUU | | AUU | |
| FOXP3.NM_014009- | CUACGUAUCAAUUG | 930 | UUCAUCAAUUGAUACGUA | 931 |
| Pr-19′ | AUGAAUU | | GUU | |
| FOXP3.NM_014009- | UCUUGAUUAUGAGA | 932 | UUAAGUCUCAUAAUCAAG | 933 |
| Pr-21′ | CUUAAUU | | AUU | |
| FOXP3.NM_014009- | AGAGGUGAGAGGUA | 934 | AUUGAUACCUCUCACCUC | 935 |
| Pr-23′ | UCAAUUU | | UUU | |
| FOXP3.NM_014009- | ACUUGAAGAGUCGG | 936 | AUUCUCCGACUCUUCAAG | 937 |
| Pr-29′ | AGAAUUU | | UUU | |
| FOXP3.NM_014009- | GAACAUGUCUCACA | 938 | UCACUUGUGAGACAUGUU | 939 |
| Pr-34′ | AGUGAUU | | CUU | |
| FOXP3.NM_014009- | GGUCUCCUCUAAAG | 940 | UAUCGCUUUAGAGGAGAC | 941 |
| Pr-40′ | CGAUAUU | | CUU | |

[0351] FOXP3 gene encodes the forkhead box P3 (FOXP3) protein. FOXP3 protein is a transcription factor that binds to specific regions of DNA and helps control the activity of genes that are involved in regulating the immune system. FOXP3 protein regulates the production and normal function of immune cells called regulatory T cells, which play an important role in preventing autoimmunity. Autoimmunity occurs when the body attacks its own tissues and organs by mistake. FOXP3 protein is found primarily in an immune system gland called the thymus, where regulatory T cells are produced. Mutations in FOXP3 gene cause immune dysregulation, polyendocrinopathy, enteropathy, X-linked (IPEX) syndrome. Mutations in the FOXP3 gene result in reduced numbers or a complete absence of regulatory T cells. Without the proper number of regulatory T cells, the body cannot control immune responses. Normal body tissues and organs are attacked, causing the multiple autoimmune disorders present in people with IPEX syndrome (Barzaghi et al., Front Immunol., vol3:211 (2012), the contents of which are incorporated herein by reference in their entirety). Mutations of FOXP3 gene are also associated with type 1 diabetes (Petzold, JDiabetes Res., vol. 2013:940710 (2013), the contents of which are incorporated herein by reference in their entirety).

[0352] In one embodiment, provided is a method of modulating FOXP3 protein levels comprising administering FOXP3-saRNA of the present invention, wherein the FOXP3-saRNA targets an antisense RNA transcript of FOXP3 gene. In one embodiment, FOXP3 protein level is increased by at least 20, 30, 40%, or at least 45, 50, 55, 60, 65, 70, 75%, or at least 80% in the presence of the FOXP3-saRNA of the present invention compared to FOXP3 protein level in the absence of the FOXP3-saRNA of the present invention. In a further embodiment, FOXP3 protein level is increased by a factor of at least 2, 3, 4, 5, 6, 7, 8, 9, 10, or by a factor of at least 15, 20, 25, 30, 35, 40, 45, 50, or by a factor of at least 60, 70, 80, 90, 100, in the presence of the FOXP3-saRNA of the present invention compared to FOXP3 protein level in the absence of the FOXP3-saRNA of the present invention.

[0353] In another embodiment, provided is a method of modulating regulatory T cell levels comprising administering FOXP3-saRNA of the present invention, wherein the FOXP3-saRNA targets an antisense RNA transcript of FOXP3 gene. In one embodiment, regulatory T cell level is increased by at least 20, 30, 40%, or at least 45, 50, 55, 60, 65, 70, 75%, or at least 80% in the presence of the FOXP3-saRNA of the present invention compared to regulatory T cell level in the absence of the FOXP3-saRNA of the present invention. In a further embodiment, regulatory T cell level is increased by a factor of at least 2, 3, 4, 5, 6, 7, 8, 9, 10, or by a factor of at least 15, 20, 25, 30, 35, 40, 45, 50, or by a factor of at least 60, 70, 80, 90, 100, in the presence of the FOXP3-saRNA of the present invention compared to regulatory T cell level in the absence of the FOXP3-saRNA of the present invention.

[0354] In another embodiment, provided is a method of prevent autoimmunity comprising administering FOXP3-saRNA of the present invention, wherein the FOXP3-saRNA targets an antisense RNA transcript of FOXP3 gene, and wherein the patient's chance of getting autoimmunity is reduced.

[0355] In another embodiment, provided is a method of treating IPEX syndrome comprising administering FOXP3-saRNA of the present invention, wherein the FOXP3-saRNA targets an antisense RNA transcript of FOXP3 gene, and wherein the symptoms of IPEX syndrome are reduced.

[0356] In another embodiment, provided is a method of treating type 1 diabetes comprising administering FOXP3-saRNA of the present invention, wherein the FOXP3-saRNA targets an antisense RNA transcript of FOXP3 gene, and wherein the symptoms of type 1 diabetes are reduced.

[0357] In one embodiment, the FOXP3-saRNA of the present invention is an antisense sequence such as, but not limited to, SEQ ID NO: 915, 917, 919, 921, 923, 925, 927, 929, 931, 933, 935, 937, 939, 941, 3762, 3764, 3766, 3768, 3770, 3772, 3774, 3776, 3778, 3780, 3782, 3784, 3786, 3788, 3790, 3792, 3794, 3796, 3798, 3800, 3802, 3804, 3806, 3808, 3810, 3812, 3814, 3816, 3818, 3820, 3822, 3824, 3826, 3828, 3830, 3832, 3834, 3836, 3838, 3840 and 3842. As a non-limiting example, these FOXP3-saRNA sequences may be used to modulate FOXP3 protein levels, modulate regulatory T cell levels, prevent autoimmunity, treat IPEX syndrome and/or treat type 1 diabetes.

[0358] In one embodiment, the FOXP3-saRNA of the present invention is an saRNA duplex. The saRNA duplex may be a pair of sense and antisense sequences such as, but not limited to, SEQ ID NOs: 914 and 915; SEQ ID NO: 916 and 917; SEQ ID NO: 918 and 919; SEQ ID NO: 920 and 921; SEQ ID NO: 922 and 923; SEQ ID NO: 924 and 925; SEQ ID NO: 926 and 927; SEQ ID NO: 928 and 929; SEQ ID NO: 930 and 931; SEQ ID NO: 932 and 933; SEQ ID NO: 934 and 935; SEQ ID NO: 936 and 937; SEQ ID NO: 938 and 939; SEQ ID NO: 940 and 941; SEQ ID NO: 3761 and 3762; SEQ ID NO: 3763 and 3764; SEQ ID NO: 3765 and 3766; SEQ ID NO: 3767 and 3768; SEQ ID NO: 3769 and 3770; SEQ ID NO: 3771 and 3772; SEQ ID NO: 3773 and 3774; SEQ ID NO: 3775 and 3776; SEQ ID NO: 3777 and 3778; SEQ ID NO: 3779 and 3780; SEQ ID NO: 3781 and 3782; SEQ ID NO: 3783 and 3784; SEQ ID NO: 3785 and 3786; SEQ ID NO: 3787 and 3788; SEQ ID NO: 3789 and 3790; SEQ ID NO: 3791 and 3792; SEQ ID NO: 3793 and 3794; SEQ ID NO: 3795 and 3796; SEQ ID NO: 3797 and 3798; SEQ ID NO: 3799 and 3800; SEQ ID NO: 3801 and 3802; SEQ ID NO: 3803 and 3804; SEQ ID NO: 3805 and 3806; SEQ ID NO: 3807 and 3808; SEQ ID NO: 3809 and 3810; SEQ ID NO: 3811 and 3812; SEQ ID NO: 3813 and 3814; SEQ ID NO: 3815 and 3816; SEQ ID NO: 3817 and 3818; SEQ ID NO: 3819 and 3820; SEQ ID NO: 3821 and 3822; SEQ ID NO: 3823 and 3824; SEQ ID NO: 3825 and 3826; SEQ ID NO: 3827 and 3828; SEQ ID NO: 3829 and 3830; SEQ ID NO: 3831 and 3832; SEQ ID NO: 3833 and 3834; SEQ ID NO: 3835 and 3836; SEQ ID NO: 3837 and 3838; SEQ ID NO: 3839 and 3840; SEQ ID NO: 3841 and 3842. As a non-limiting example, these FOXP3-saRNA sequences which are saRNA duplexes may be used to modulate FOXP3 protein levels, modulate regulatory T cell levels, prevent autoimmunity, treat IPEX syndrome and/or treat type 1 diabetes.

### HNF4A Gene

[0359] As another non-limiting example, provided is a method of modulating the expression of HNF4A gene comprising administering saRNA of the present invention, wherein the saRNA targets an antisense RNA transcript of HNF4A gene. These saRNAs are called HNF4A-saRNA. In one embodiment, the expression of HNF4A gene is increased by at least 20, 30, 40%, or at least 45, 50, 55, 60, 65, 70, 75%, or at least 80% in the presence of the HNF4A-saRNA of the present invention compared to the expression of HNF4A gene in the absence of the HNF4A-saRNA of the present invention. In a further embodiment, the expression of HNF4A gene is increased by a factor of at least 2, 3, 4, 5, 6, 7, 8, 9, 10, or by a factor of at least 15, 20, 25, 30, 35, 40, 45, 50, or by a factor of at least 60, 70, 80, 90, 100, in the presence of the HNF4A-saRNA of the present invention compared to the expression of HNF4A gene in the absence of the HNF4A-saRNA of the present invention. The modulation of the expression of HNF4A gene may be reflected or determined by the change of HNF4A mRNA levels.

[0360] HNF4A-saRNAs may be single-stranded and comprise 14-30 nucleotides. The sequence of a single-stranded HNF4A-saRNA may have at least 60%, 70%, 80% or 90% identity with a sequence selected from the sequences of the antisense strands in Table 20-2. In one embodiment, the single-stranded saRNA comprises a sequence selected from the sequences of the antisense strands in Table 20-2. In one embodiment, the single-stranded HNF4A-saRNA may have a 3′ tail. The sequence of a single-stranded HNF4A-saRNA with a 3′ tail may have at least 60%, 70%, 80% or 90% identity with a sequence selected from the sequences of the antisense strands in Table 21. In one embodiment, the single-stranded saRNA comprises a sequence selected from the sequences of the antisense strands in Table 21.

[0361] HNF4A-saRNAs may be double-stranded. The two strands form a duplex and each strand comprises 14-30 nucleotides. The first strand of a double-stranded HNF4A-saRNA may have at least 60%, 70%, 80% or 90% identity with a sequence selected from the sequences of the antisense strands in Table 20-2. In one embodiment, the first strand of the double-stranded saRNA comprises a sequence selected from the sequences of the antisense strands in Table 20-2. The second strand of a double-stranded HNF4A-saRNA may have at least 60%, 70%, 80% or 90% identity with a sequence selected from the sequences of the sense strands in Table 20-2. In one embodiment, the second strand of the double-stranded saRNA comprises a sequence selected from the sequences of the sense strands in Table 20-2. In one embodiment, the double-stranded HNF4A-saRNA may have a 3′ overhang on each strand. The first strand of a double-stranded HNF4A-saRNA may have at least 60%, 70%, 80% or 90% identity with a sequence selected from the sequences of the antisense strands in Table 21. In one embodiment, the first strand of the double-stranded saRNA comprises a sequence selected from the sequences of the antisense strands in Table 21. The second strand of a double-stranded HNF4A-saRNA may have at least 60%, 70%, 80% or 90% identity with a sequence selected from the sequences of the sense strands in Table 21. In one embodiment, the second strand of the double-stranded saRNA comprises a sequence selected from the sequences of the sense strands in Table 21.

[0362] HNF4A-saRNAs may be modified or unmodified.

[0363] Table 20-1 describes the target gene, the targeted sequence, the genomic location of the targeted sequence and the relative location of HNF4A-saRNAs with no 3′ overhang. In Table 20-1, the targeted sequence is defined as a region on the template strand of the target gene which is identical to a region on the target antisense RNA transcript to which the antisense strand of an saRNA hybridizes. In Table 20-1, the relative location is the distance from the 5′ end of the targeted sequence to the TSS. A negative number represents a location upstream of the TSS and a positive number represents a location downstream of the TSS.

TABLE 20-1
Sequences of HNF4A-saRNAs (with no 3′ overhang)

| | Target | | Targeted | Genomic Location of the | Relative |
|---|---|---|---|---|---|
| saRNA ID | Gene | Targeted sequence | sequence ID | Targeted sequence | Location |
| HNF4A.NM_000457- | HNF4A | tcagttatcaattgtacaa | 942 | chr20: 43029671 minus | −205 |
| Pr-3 | human | | | strand | |
| HNF4A.NM_000457- | HNF4A | ggcattctaactgatacta | 943 | chr20: 43029575 minus | −301 |
| Pr-16 | human | | | strand | |
| HNF4A.NM_000457- | HNF4A | gcggttatgtctccaacca | 944 | chr20: 43030554 minus | 678 |
| Pr-19 | human | | | strand | |
| HNF4A.NM_000457- | HNF4A | tgagttggcttcgtagtta | 945 | chr20: 43030652 minus | 776 |
| Pr-23 | human | | | strand | |
| HNF4A.NM_000457- | HNF4A | gagaaatgcggttatgtct | 946 | chr20: 43030561 minus | 685 |
| Pr-26 | human | | | strand | |
| HNF4A.NM_000457- | HNF4A | cgagaaatgcggttatgtc | 947 | chr20: 43030562 minus | 686 |
| Pr-36 | human | | | strand | |
| HNF4A.NM_000457- | HNF4A | aggcattctaactgatact | 948 | chr20: 43029576 minus | −300 |
| Pr-37 | human | | | strand | |
| HNF4A.NM_175914- | HNF4A | agatcgtcattcaaagata | 949 | chr20: 42983671 minus | −750 |
| Pr-1 | human | | | strand | |
| HNF4A.NM_175914- | HNF4A | gcgttgtttccttgaacaa | 950 | chr20: 42985183 minus | 762 |
| Pr-3 | human | | | strand | |
| HNF4A.NM_175914- | HNF4A | cgttgtttccttgaacaat | 951 | chr20: 42985182 minus | 761 |
| Pr-4 | human | | | strand | |
| HNF4A.NM_175914- | HNF4A | tgtgtcattccacgaattt | 952 | chr20: 42985343 minus | 922 |
| Pr-7 | human | | | strand | |
| HNF4A.NM_175914- | HNF4A | ggcgttaccatatttaaat | 953 | chr20: 42983904 minus | −517 |
| Pr-8 | human | | | strand | |
| HNF4A.NM_175914- | HNF4A | aattaaaccttgagatgaa | 954 | chr20: 42983888 minus | −533 |
| Pr-9 | human | | | strand | |
| HNF4A.NM_175914- | HNF4A | gagctttgggcccgtaaga | 955 | chr20: 42984573 minus | 152 |
| Pr-15 | human | | | strand | |
| HNF4A.NM_175914- | HNF4A | ggtggatacgttaaagagt | 956 | chr20: 42984266 minus | −155 |
| Pr-16 | human | | | strand | |
| HNF4A.NM_175914- | HNF4A | gcgttaccatatttaaatt | 957 | chr20: 42983903 minus | −518 |
| Pr-19 | human | | | strand | |
| HNF4A.NM_175914- | HNF4A | ggagaactgtgtttagtga | 958 | chr20: 42983953 minus | −468 |
| Pr-22 | human | | | strand | |
| HNF4A.NM_175914- | HNF4A | caggcgttaccatatttaa | 959 | chr20: 42983906 minus | −515 |
| Pr-25 | human | | | strand | |
| HNF4A.NM_175914- | HNF4A | ccttaatcagatcgtcatt | 960 | chr20: 42983679 minus | −742 |
| Pr-27 | human | | | strand | |
| HNF4A.NM_175914- | HNF4A | gctttgggcccgtaagaaa | 961 | chr20: 42984571 minus | 150 |
| Pr-31 | human | | | strand | |
| HNF4A.NM_175914- | HNF4A | gcccggttatcttattgat | 962 | chr20: 42984305 minus | −116 |
| Pr-32 | human | | | strand | |
| HNF4A.NM_175914- | HNF4A | ggatagcattccactgtaa | 963 | chr20: 42985162 minus | 741 |
| Pr-36 | human | | | strand | |
| HNF4A.NM_175914- | HNF4A | gtggatacgttaaagagta | 964 | chr20: 42984265 minus | −156 |
| Pr-39 | human | | | strand | |

TABLE 20-2
Sequences of HNF4A-saRNAs (with no 3′ overhang)

| | | Sense SEQ | | Antisense |
|---|---|---|---|---|
| saRNA ID | Sense (passenger) | ID | Antisense (guide) | SEQ ID |
| HNF4A.NM_000457- | UCAGUUAUCAAU | 965 | UUGUACAAUU | 966 |
| Pr-3 | UGUACAA | | GAUAACUGA | |
| HNF4A.NM_000457- | GGCAUUCUAACU | 967 | UAGUAUCAGU | 968 |
| Pr-16 | GAUACUA | | UAGAAUGCC | |
| HNF4A.NM_000457- | GCGGUUAUGUCU | 969 | UGGUUGGAGA | 970 |
| Pr-19 | CCAACCA | | CAUAACCGC | |
| HNF4A.NM_000457- | UGAGUUGGCUUC | 971 | UAACUACGAA | 972 |
| Pr-23 | GUAGUUA | | GCCAACUCA | |
| HNF4A.NM_000457- | GAGAAAUGCGG | 973 | AGACAUAACC | 974 |
| Pr-26 | UUAUGUCU | | GCAUUUCUC | |
| HNF4A.NM_000457- | CGAGAAAUGCGG | 975 | GACAUAACCG | 976 |
| Pr-36 | UUAUGUC | | CAUUUCUCG | |
| HNF4A.NM_000457- | AGGCAUUCUAAC | 977 | AGUAUCAGUU | 978 |
| Pr-37 | UGAUACU | | AGAAUGCCU | |
| HNF4A.NM_175914- | AGAUCGUCAUUC | 979 | UAUCUUUGAA | 980 |
| Pr-1 | AAAGAUA | | UGACGAUCU | |
| HNF4A.NM_175914- | GCGUUGUUUCCU | 981 | UUGUUCAAGG | 982 |
| Pr-3 | UGAACAA | | AAACAACGC | |
| HNF4A.NM_175914- | CGUUGUUUCCUU | 983 | AUUGUUCAAG | 984 |
| Pr-4 | GAACAAU | | GAAACAACG | |
| HNF4A.NM_175914- | UGUGUCAUUCCA | 985 | AAAUUCGUGG | 986 |
| Pr-7 | CGAAUUU | | AAUGACACA | |
| HNF4A.NM_175914- | GGCGUUACCAUA | 987 | AUUUAAAUAU | 988 |
| Pr-8 | UUUAAAU | | GGUAACGCC | |
| HNF4A.NM_175914- | AAUUAAACCUUG | 989 | UUCAUCUCAA | 990 |
| Pr-9 | AGAUGAA | | GGUUUAAUU | |
| HNF4A.NM_175914- | GAGCUUUGGGCC | 991 | UCUUACGGGC | 992 |
| Pr-15 | CGUAAGA | | CCAAAGCUC | |
| HNF4A.NM_175914- | GGUGGAUACGU | 993 | ACUCUUUAAC | 994 |
| Pr-16 | UAAAGAGU | | GUAUCCACC | |
| HNF4A.NM_175914- | GCGUUACCAUAU | 995 | AAUUUAAAUA | 996 |
| Pr-19 | UUAAAUU | | UGGUAACGC | |
| HNF4A.NM_175914- | GGAGAACUGUG | 997 | UCACUAAACA | 998 |
| Pr-22 | UUUAGUGA | | CAGUUCUCC | |
| HNF4A.NM_175914- | CAGGCGUUACCA | 999 | UUAAAUAUGG | 1000 |
| Pr-25 | UAUUUAA | | UAACGCCUG | |
| HNF4A.NM_175914- | CCUUAAUCAGAU | 1001 | AAUGACGAUC | 1002 |
| Pr-27 | CGUCAUU | | UGAUUAAGG | |
| HNF4A.NM_175914- | GCUUUGGGCCCG | 1003 | UUUCUUACGG | 1004 |
| Pr-31 | UAAGAAA | | GCCCAAAGC | |
| HNF4A.NM_175914- | GCCCGGUUAUCU | 1005 | AUCAAUAAGA | 1006 |
| Pr-32 | UAUUGAU | | UAACCGGGC | |
| HNF4A.NM_175914- | GGAUAGCAUUCC | 1007 | UUACAGUGGA | 1008 |
| Pr-36 | ACUGUAA | | AUGCUAUCC | |
| HNF4A.NM_175914- | GUGGAUACGUU | 1009 | UACUCUUUAA | 1010 |
| Pr-39 | AAAGAGUA | | CGUAUCCAC | |

TABLE 21
Sequences of HNF4A-saRNAs (with 3′ overhang)

| | | Sense | | Antisense |
|---|---|---|---|---|
| saRNA ID | Sense (passenger) | SEQ ID | Antisense (guide) | SEQ ID |
| HNF4A.NM_000457- | UCAGUUAUCAAUUGU | 1011 | UUGUACAAUUGAUAA | 1012 |
| Pr-3′ | ACAAUU | | CUGAUU | |
| HNF4A.NM_000457- | GGCAUUCUAACUGAU | 1013 | UAGUAUCAGUUAGAA | 1014 |
| Pr-16′ | ACUAUU | | UGCCUU | |
| HNF4A.NM_000457- | GCGGUUAUGUCUCCA | 1015 | UGGUUGGAGACAUAA | 1016 |
| Pr-19′ | ACCAUU | | CCGCUU | |
| HNF4A.NM_000457- | UGAGUUGGCUUCGUA | 1017 | UAACUACGAAGCCAA | 1018 |
| Pr-23′ | GUUAUU | | CUCAUU | |
| HNF4A.NM_000457- | GAGAAAUGCGGUUAU | 1019 | AGACAUAACCGCAUU | 1020 |
| Pr-26′ | GUCUUU | | UCUCUU | |
| HNF4A.NM_000457- | CGAGAAAUGCGGUUA | 1021 | GACAUAACCGCAUUU | 1022 |
| Pr-36′ | UGUCUU | | CUCGUU | |
| HNF4A.NM_000457- | AGGCAUUCUAACUGA | 1023 | AGUAUCAGUUAGAAU | 1024 |
| Pr-37′ | UACUUU | | GCCUUU | |
| HNF4A.NM_175914- | AGAUCGUCAUUCAAA | 1025 | UAUCUUUGAAUGACG | 1026 |
| Pr-1′ | GAUAUU | | AUCUUU | |
| HNF4A.NM_175914- | GCGUUGUUUCCUUGA | 1027 | UUGUUCAAGGAAACA | 1028 |
| Pr-3′ | ACAAUU | | ACGCUU | |
| HNF4A.NM_175914- | CGUUGUUUCCUUGAA | 1029 | AUUGUUCAAGGAAAC | 1030 |
| Pr-4′ | CAAUUU | | AACGUU | |
| HNF4A.NM_175914- | UGUGUCAUUCCACGA | 1031 | AAAUUCGUGGAAUGA | 1032 |
| Pr-7′ | AUUUUU | | CACAUU | |
| HNF4A.NM_175914- | GGCGUUACCAUAUUU | 1033 | AUUUAAAUAUGGUAA | 1034 |
| Pr-8′ | AAAUUU | | CGCCUU | |
| HNF4A.NM_175914- | AAUUAAACCUUGAGA | 1035 | UUCAUCUCAAGGUUU | 1036 |
| Pr-9′ | UGAAUU | | AAUUUU | |
| HNF4A.NM_175914- | GAGCUUUGGGCCCGU | 1037 | UCUUACGGGCCCAAA | 1038 |
| Pr-15′ | AAGAUU | | GCUCUU | |
| HNF4A.NM_175914- | GGUGGAUACGUUAAA | 1039 | ACUCUUUAACGUAUC | 1040 |
| Pr-16′ | GAGUUU | | CACCUU | |
| HNF4A.NM_175914- | GCGUUACCAUAUUUA | 1041 | AAUUUAAAUAUGGUA | 1042 |
| Pr-19′ | AAUUUU | | ACGCUU | |
| HNF4A.NM_175914- | GGAGAACUGUGUUUA | 1043 | UCACUAAACACAGUU | 1044 |
| Pr-22′ | GUGAUU | | CUCCUU | |
| HNF4A.NM_175914- | CAGGCGUUACCAUAU | 1045 | UUAAAUAUGGUAACG | 1046 |
| Pr-25′ | UUAAUU | | CCUGUU | |
| HNF4A.NM_175914- | CCUUAAUCAGAUCGU | 1047 | AAUGACGAUCUGAUU | 1048 |
| Pr-27′ | CAUUUU | | AAGGUU | |
| HNF4A.NM_175914- | GCUUUGGGCCCGUAA | 1049 | UUUCUUACGGGCCCA | 1050 |
| Pr-31′ | GAAAUU | | AAGCUU | |
| HNF4A.NM_175914- | GCCCGGUUAUCUUAU | 1051 | AUCAAUAAGAUAACC | 1052 |
| Pr-32′ | UGAUUU | | GGGCUU | |
| HNF4A.NM_175914- | GGAUAGCAUUCCACU | 1053 | UUACAGUGGAAUGCU | 1054 |
| Pr-36′ | GUAAUU | | AUCCUU | |
| HNF4A.NM_175914- | GUGGAUACGUUAAAG | 1055 | UACUCUUUAACGUAU | 1056 |
| Pr-39′ | AGUAUU | | CCACUU | |

[0364] HNF4A gene encodes HNF4A protein which is a member of the nuclear receptor family of transcription factors and is the most abundant DNA-binding protein in the liver, where it regulates genes largely involved in the hepatic gluconeogenic program and lipid metabolism. HNF4A is a liver master regulator. It is involved in non-alcoholic fatty liver disease (NAFLD), liver fibrosis, cirrhosis, hepatocellular carcinoma (HCC), diabetes, inflammation, drug metabolism, encephalopathy, and bleeding disorders. HNF4A haplotypes are associated with high serum lipids and metabolic syndrome. NHF4A polymorphisms are associated with cytochrome P450 activity. Reduced HNF4A expression levels in biopsies correlate with fibrosis and progression to HCC. Low HNF4A correlates with aggressive HCC phenotype and poor prognosis. Mutations in HNF4A promoter and response elements are linked to Mature Onset Diabetes of the Young (MODY). In the pancreas HNF-4α is also a master regulator, controlling an estimated 11% of islet genes. HNF-4α gene mutations are linked to maturity-onset diabetes of the young, type 1 (MODY1), type 2 diabetes, and hyperinsulinaemic hypoglycaemia (Chandra et al., Nature, vol. 495:394 (2013), the contents of which are incorporated herein by reference in their entirety).

[0365] In one embodiment, provided is a method of modulating HNF4A protein levels comprising administering HNF4A-saRNA of the present invention, wherein the HNF4A-saRNA targets an antisense RNA transcript of HNF4A gene. In one embodiment, HNF4A protein level is increased by at least 20, 30, 40%, or at least 45, 50, 55, 60, 65, 70, 75%, or at least 80% in the presence of the HNF4A-saRNA of the present invention compared to HNF4A protein level in the absence of the HNF4A-saRNA of the present invention. In a further embodiment, HNF4A protein level is increased by a factor of at least 2, 3, 4, 5, 6, 7, 8, 9, 10, or by a factor of at least 15, 20, 25, 30, 35, 40, 45, 50, or by a factor of at least 60, 70, 80, 90, 100, in the presence of the HNF4A-saRNA of the present invention compared to HNF4A protein level in the absence of the HNF4A-saRNA of the present invention.

[0366] In another embodiment, provided is a method of regulating liver metabolism comprising administering HNF4A-saRNA of the present invention, wherein the HNF4A-saRNA targets an antisense RNA transcript of HNF4A gene. In another embodiment, provided is a method of treating MODY, diabetes, NAFLD, HCC, liver fibrosis, cirrhosis, HCC, inflammation, encephalopathy, bleeding disorders, or hyperinsulinaemic hypoglycemia by administering the HNF4A-saRNA of the present invention, wherein the HNF4A-saRNA targets an antisense RNA transcript of HNF4A gene, and wherein the symptoms of MODY, diabetes, NAFLD, HCC, liver fibrosis, cirrhosis, HCC, inflammation, encephalopathy, bleeding disorders, or hyperinsulinaemic hypoglycemia are reduced.

[0367] In one embodiment, the HNF4A-saRNA of the present invention is an antisense sequence such as, but not limited to, SEQ ID NO: 966, 968, 970, 972, 974, 976, 978, 980, 982, 984, 986, 988, 990, 992, 994, 996, 998, 1000, 1002, 1004, 1006, 1008, 1010, 1012, 1014, 1016, 1018, 1020, 1022, 1024, 1026, 1028, 1030, 1032, 1034, 1036, 1038, 1040, 1042, 1044, 1046, 1048, 1050, 1052, 1054, 1056, 3844, 3846, 3848, 3850, 3852, 3854, 3856, 3858, 3860, 3862, 3864, 3866, 3868, 3870, 3872, 3874, 3876, 3878, 3880, 3882, 3884, 3886, 3888, 3890, 3892, 3894, 3896, 3898, 3900, 3902, 3904, 3906, 3908, 3910, 3912, 3914, 3916, 3918, 3920, 3922, 3924, 3926, 3928, 3930, 3932, 3934, 3936, 3938, 3940, 3942, 3944, 3946, 3948, 3950, 3952, 3954, 3956, 3958, 3960, 3962, 3964, 3966, 3968, 3970, 3972, 3974, 3976, 3978, 3980, 3982, 3984, 3986, 3988, 3990, 3992, 3994, 3996, 3998, 4000, 4002, 4004, 4006, 4008, 4010, 4012, 4014, 4016, 4018, 4020, 4022, 4024, 4026, 4028, 4030, 4032, 4034, 4036, 4038 and 4040. As a non-limiting example, these HNF4A-saRNA sequences may be used to modulate HNF4A protein levels, modulating liver metabolism and/or treating MODY, diabetes, NAFLD, HCC, liver fibrosis, cirrhosis, HCC, inflammation, encephalopathy, bleeding disorders, or hyperinsulinaemic hypoglycemia.

[0368] In one embodiment, the HNF4A-saRNA of the present invention is an saRNA duplex. The saRNA duplex may be a pair of sense and antisense sequences such as, but not limited to, SEQ ID NOs: 965 and 966; SEQ ID NOs: 967 and 968; SEQ ID NOs: 969 and 970; SEQ ID NOs: 971 and 972; SEQ ID NOs: 973 and 974; SEQ ID NOs: 975 and 976; SEQ ID NOs: 977 and 978; SEQ ID NOs: 979 and 980; SEQ ID NOs: 981 and 982; SEQ ID NOs: 983 and 984; SEQ ID NOs: 985 and 986; SEQ ID NOs: 987 and 988; SEQ ID NOs: 989 and 990; SEQ ID NOs: 991 and 992; SEQ ID NOs: 993 and 994; SEQ ID NOs: 995 and 996; SEQ ID NOs: 997 and 998; SEQ ID NOs: 999 and 1000; SEQ ID NOs: 1001 and 1002; SEQ ID NOs: 1003 and 1004; SEQ ID NOs: 1005 and 1006; SEQ ID NOs: 1007 and 1008; SEQ ID NOs: 1009 and 1010; SEQ ID NOs: 1011 and 1012; SEQ ID NOs: 1013 and 1014; SEQ ID NOs: 1015 and 1016; SEQ ID NOs: 1017 and 1018; SEQ ID NOs: 1019 and 1020; SEQ ID NOs: 1021 and 1022; SEQ ID NOs: 1023 and 1024; SEQ ID NOs: 1025 and 1026; SEQ ID NOs: 1027 and 1028; SEQ ID NOs: 1029 and 1030; SEQ ID NOs: 1031 and 1032; SEQ ID NOs: 1033 and 1034; SEQ ID NOs: 1035 and 1036; SEQ ID NOs: 1037 and 1038; SEQ ID NOs: 1039 and 1040; SEQ ID NOs: 1041 and 1042; SEQ ID NOs: 1043 and 1044; SEQ ID NOs: 1045 and 1046; SEQ ID NOs: 1047 and 1048; SEQ ID NOs: 1049 and 1050; SEQ ID NOs: 1051 and 1052; SEQ ID NOs: 1053 and 1054; SEQ ID NOs: 1055 and 1056; SEQ ID NOs: 3843 and 3844; SEQ ID NOs: 3845 and 3846; SEQ ID NOs: 3847 and 3848; SEQ ID NOs: 3849 and 3850; SEQ ID NOs: 3851 and 3852; SEQ ID NOs: 3853 and 3854; SEQ ID NOs: 3855 and 3856; SEQ ID NOs: 3857 and 3858; SEQ ID NOs: 3859 and 3860; SEQ ID NOs: 3861 and 3862; SEQ ID NOs: 3863 and 3864; SEQ ID NOs: 3865 and 3866; SEQ ID NOs: 3867 and 3868; SEQ ID NOs: 3869 and 3870; SEQ ID NOs: 3871 and 3872; SEQ ID NOs: 3873 and 3874; SEQ ID NOs: 3875 and 3876; SEQ ID NOs: 3877 and 3878; SEQ ID NOs: 3879 and 3880; SEQ ID NOs: 3881 and 3882; SEQ ID NOs: 3883 and 3884; SEQ ID NOs: 3885 and 3886; SEQ ID NOs: 3887 and 3888; SEQ ID NOs: 3889 and 3890; SEQ ID NOs: 3891 and 3892; SEQ ID NOs: 3893 and 3894; SEQ ID NOs: 3895 and 3896; SEQ ID NOs: 3897 and 3898; SEQ ID NOs: 3899 and 3900; SEQ ID NOs: 3901 and 3902; SEQ ID NOs: 3903 and 3904; SEQ ID NOs: 3905 and 3906; SEQ ID NOs: 3907 and 3908; SEQ ID NOs: 3909 and 3910; SEQ ID NOs: 3911 and 3912; SEQ ID NOs: 3913 and 3914; SEQ ID NOs: 3915 and 3916; SEQ ID NOs: 3917 and 3918; SEQ ID NOs: 3919 and 3920; SEQ ID NOs: 3921 and 3922; SEQ ID NOs: 3923 and 3924; SEQ ID NOs: 3925 and 3926; SEQ ID NOs: 3927 and 3928; SEQ ID NOs: 3929 and 3930; SEQ ID NOs: 3931 and 3932; SEQ ID NOs: 3933 and 3934; SEQ ID NOs: 3935 and 3936; SEQ ID NOs: 3937 and 3938; SEQ ID NOs: 3939 and 3940; SEQ ID NOs: 3941 and 3942; SEQ ID NOs: 3943 and 3944; SEQ ID NOs: 3945 and 3946; SEQ ID NOs: 3947 and 3948; SEQ ID NOs: 3949 and 3950; SEQ ID NOs: 3951 and 3952; SEQ ID NOs: 3953 and 3954; SEQ ID NOs: 3955 and 3956; SEQ ID NOs: 3957 and 3958; SEQ ID NOs: 3959 and 3960; SEQ ID NOs: 3961 and 3962; SEQ ID NOs: 3963 and 3964; SEQ ID NOs: 3965 and 3966; SEQ ID NOs: 3967 and 3968; SEQ ID NOs: 3969 and 3970; SEQ ID NOs: 3971 and 3972; SEQ ID NOs: 3973 and 3974; SEQ ID NOs: 3975 and 3976; SEQ ID NOs: 3977 and 3978; SEQ ID NOs: 3979 and 3980; SEQ ID NOs: 3981 and 3982; SEQ ID NOs: 3983 and 3984; SEQ ID NOs: 3985 and 3986; SEQ ID NOs: 3987 and 3988; SEQ ID NOs: 3989 and 3990; SEQ ID NOs: 3991 and 3992; SEQ ID NOs: 3993 and 3994; SEQ ID NOs: 3995 and 3996; SEQ ID NOs: 3997 and 3998; SEQ ID NOs: 3999 and 4000; SEQ ID NOs: 4001 and 4002; SEQ ID NOs: 4003 and 4004; SEQ ID NOs: 4005 and 4006; SEQ ID NOs: 4007 and 4008; SEQ ID NOs: 4009 and 4010; SEQ ID NOs: 4011 and 4012; SEQ ID NOs: 4013 and 4014; SEQ ID NOs: 4015 and 4016; SEQ ID NOs: 4017 and 4018; SEQ ID NOs: 4019 and 4020; SEQ ID NOs: 4021 and 4022; SEQ ID NOs: 4023 and 4024; SEQ ID NOs: 4025 and 4026; SEQ ID NOs: 4027 and 4028; SEQ ID NOs: 4029 and 4030; SEQ ID NOs: 4031 and 4032; SEQ ID NOs: 4033 and 4034; SEQ ID NOs: 4035 and 4036; SEQ ID NOs: 4037 and 4038; SEQ ID NOs: 4039 and 4040. As a non-limiting example, these HNF4A-saRNA sequences which are saRNA duplexes may be used to modulate HNF4A protein levels, modulating liver metabolism and/or treating MODY, diabetes, NAFLD, HCC, liver fibrosis, cirrhosis, HCC, inflammation, encephalopathy, bleeding disorders, or hyperinsulinaemic hypoglycemia.

### IFNG Gene

[0369] As another non-limiting example, provided is a method of modulating the expression of IFNG gene comprising administering saRNA of the present invention, wherein the saRNA targets an antisense RNA transcript of IFNG gene. These saRNAs are called IFNG-saRNA. In one embodiment, the expression of IFNG gene is increased by at least 20, 30, 40%, or at least 45, 50, 55, 60, 65, 70, 75%, or at least 80% in the presence of the IFNG-saRNA of the present invention compared to the expression of IFNG gene in the absence of the IFNG-saRNA of the present invention. In a further embodiment, the expression of IFNG gene is increased by a factor of at least 2, 3, 4, 5, 6, 7, 8, 9, 10, or by a factor of at least 15, 20, 25, 30, 35, 40, 45, 50, or by a factor of at least 60, 70, 80, 90, 100, in the presence of the IFNG-saRNA of the present invention compared to the expression of IFNG gene in the absence of the IFNG-saRNA of the present invention. The modulation of the expression of HNF4A gene may be reflected or determined by the change of IFNG mRNA levels.

[0370] IFNG-saRNAs may be single-stranded and comprise 14-30 nucleotides. The sequence of a single-stranded IFNG-saRNA may have at least 60%, 70%, 80% or 90% identity with a sequence selected from the sequences of the antisense strands in Table 22-2. In one embodiment, the single-stranded saRNA comprises a sequence selected from the sequences of the antisense strands in Table 22-2. In one embodiment, the single-stranded IFNG-saRNA may have a 3′ tail. The sequence of a single-stranded IFNG-saRNA with a 3′ tail may have at least 60%, 70%, 80% or 90% identity with a sequence selected from the sequences of the antisense strands in Table 23. In one embodiment, the single-stranded saRNA comprises a sequence selected from the sequences of the antisense strands in Table 23.

[0371] IFNG-saRNAs may be double-stranded. The two strands form a duplex and each strand comprises 14-30 nucleotides. The first strand of a double-stranded IFNG-saRNA may have at least 60%, 70%, 80% or 90% identity with a sequence selected from the sequences of the antisense strands in Table 22-2. In one embodiment, the first strand of the double-stranded saRNA comprises a sequence selected from the sequences of the antisense strands in Table 22-2. The second strand of a double-stranded IFNG-saRNA may have at least 60%, 70%, 80% or 90% identity with a sequence selected from the sequences of the sense strands in Table 22-2. In one embodiment, the second strand of the double-stranded saRNA comprises a sequence selected from the sequences of the sense strands in Table 22-2. In one embodiment, the double-stranded IFNG-saRNA may have a 3′ overhang on each strand. The first strand of a double-stranded IFNG-saRNA may have at least 60%, 70%, 80% or 90% identity with a sequence selected from the sequences of the antisense strands in Table 23. In one embodiment, the first strand of the double-stranded saRNA comprises a sequence selected from the sequences of the antisense strands in Table 23. The second strand of a double-stranded IFNG-saRNA may have at least 60%, 70%, 80% or 90% identity with a sequence selected from the sequences of the sense strands in Table 23. In one embodiment, the second strand of the double-stranded saRNA comprises a sequence selected from the sequences of the sense strands in Table 23.

[0372] IFNG-saRNAs may be modified or unmodified.

[0373] Table 22-1 describes the target gene, the targeted sequence, the genomic location of the targeted sequence and the relative location of IFNG-saRNAs with no 3′ overhang. In Table 22-1, the targeted sequence is defined as a region on the template strand of the target gene which is identical to a region on the target antisense RNA transcript to which the antisense strand of an saRNA hybridizes. In Table 22-1, the relative location is the distance from the 5′ end of the targeted sequence to the TSS. A negative number represents a location upstream of the TSS and a positive number represents a location downstream of the TSS.

TABLE 22-1
Sequences of IFNG-saRNAs (with no 3′ overhang)

| | Target | | Targeted | Genomic Location of the | Relative |
|---|---|---|---|---|---|
| saRNA ID | Gene | Targeted sequence | sequence ID | Targeted sequence | Location |
| IFNG.NM_000619- | IFNG | catcgtttccgagagaatt | 1057 | chr12: 68553392 plus | 129 |
| Pr-2 | human | | | strand | |
| IFNG.NM_000619- | IFNG | atcgtttccgagagaatta | 1058 | chr12: 68553393 plus | 128 |
| Pr-3 | human | | | strand | |
| IFNG.NM_000619- | IFNG | attgaagtctcctgaggat | 1059 | chr12: 68553555 plus | −34 |
| Pr-11 | human | | | strand | |
| IFNG.NM_000619- | IFNG | tcgtttccgagagaattaa | 1060 | chr12: 68553394 plus | 127 |
| Pr-16 | human | | | strand | |
| IFNG.NM_000619- | IFNG | ttcatcgtttccgagagaa | 1061 | chr12: 68553390 plus | 131 |
| Pr-35 | human | | | strand | |

TABLE 22-2
Sequences of IFNG-saRNAs (with no 3′ overhang)

| | | | | Antisense SEQ |
|---|---|---|---|---|
| saRNA ID | Sense (passenger) | Sense SEQ ID | Antisense (guide) | ID |
| IFNG.NM_000619- | CAUCGUUUCCGA | 1062 | AAUUCUCUCGGAAA | 1071 |
| Pr-2 | GAGAAUU | | CGAUG | |
| IFNG.NM_000619- | AUCGUUUCCGAG | 1064 | UAAUUCUCUCGGAA | 1073 |
| Pr-3 | AGAAUUA | | ACGAU | |
| IFNG.NM_000619- | AUUGAAGUCUCC | 1066 | AUCCUCAGGAGACU | 1075 |
| Pr- | UGAGGAU | | UCAAU | |
| 11 | | | | |
| IFNG.NM_000619- | UCGUUUCCGAGA | 1068 | UUAAUUCUCUCGGA | 1077 |
| Pr- | GAAUUAA | | AACGA | |
| 16 | | | | |
| IFNG.NM_000619- | UUCAUCGUUUCC | 1070 | UUCUCUCGGAAACG | 1079 |
| Pr- | GAGAGAA | | AUGAA | |
| 35 | | | | |

TABLE 23
Sequences of IFNG-saRNAs (with 3′ overhang)

| | | | | Antisense SEQ |
|---|---|---|---|---|
| saRNA ID | Sense (passenger) | Sense SEQ ID | Antisense (guide) | ID |
| IFNG.NM_000619- | CAUCGUUUCCGA | 1080 | AAUUCUCUCGGAAA | 1081 |
| Pr-2′ | GAGAAUUUU | | CGAUGUU | |
| IFNG.NM_000619- | AUCGUUUCCGAG | 1082 | UAAUUCUCUCGGAA | 1083 |
| Pr-3′ | AGAAUUAUU | | ACGAUUU | |
| IFNG.NM_000619- | AUUGAAGUCUCC | 1084 | AUCCUCAGGAGACU | 1085 |
| Pr-11′ | UGAGGAUUU | | UCAAUUU | |
| IFNG.NM_000619- | UCGUUUCCGAGA | 1086 | UUAAUUCUCUCGGA | 1087 |
| Pr-16′ | GAAUUAAUU | | AACGAUU | |
| IFNG.NM_000619- | UUCAUCGUUUCC | 1088 | UUCUCUCGGAAACG | 1089 |
| Pr-35′ | GAGAGAAUU | | AUGAAUU | |

[0374] IFNG gene encodes interferon gamma which is a member of the type II interferon family. Interferon gamma has antiviral, immunoregulatory and anti-tumor activities. It is a potent activator of macrophages, has antiproliferative effects on transformed cells, and can potentiate the antiviral and antitumor effects of the type I interferon. Mutations in IFNG gene cause aplastic anemia (AA), a form of anemia in which the bone marrow does not produce enough numbers of peripheral blood elements. AA is characterized by peripheral pancytopenia and marrow hypoplasia (Dufour et al., British J of Haematology, vol. 126 (5):682 (2004), the contents of which are incorporated herein by reference in their entirety). Mutations in IFNG gene are also involved in susceptibility to congenital HIV, hepatitis C virus, mycobacterium tuberculosis, and tuberous sclerosis.

[0375] In one embodiment, provided is a method of modulating interferon gamma protein levels comprising administering IFNG-saRNA of the present invention, wherein the IFNG-saRNA targets an antisense RNA transcript of IFNG gene. In one embodiment, interferon gamma protein level is increased by at least 20, 30, 40%, or at least 45, 50, 55, 60, 65, 70, 75%, or at least 80% in the presence of the IFNG-saRNA of the present invention compared to interferon gamma protein level in the absence of the IFNG-saRNA of the present invention. In a further embodiment, interferon gamma protein level is increased by a factor of at least 2, 3, 4, 5, 6, 7, 8, 9, 10, or by a factor of at least 15, 20, 25, 30, 35, 40, 45, 50, or by a factor of at least 60, 70, 80, 90, 100, in the presence of the IFNG-saRNA of the present invention compared to interferon gamma protein level in the absence of the IFNG-saRNA of the present invention.

[0376] In another embodiment, provided is a method of treating aplastic anemia comprising administering IFNG-saRNA of the present invention, wherein the IFNG-saRNA targets an antisense RNA transcript of IFNG gene, and wherein the symptoms of aplastic anemia are reduced.

[0377] In another embodiment, provided is a method of reducing a patient's susceptibility to congenital HIV, hepatitis C virus, mycobacterium tuberculosis and tuberous sclerosis, comprising administering IFNG-saRNA of the present invention to a patient in need thereof, wherein the IFNG-saRNA targets an antisense RNA transcript of IFNG gene.

[0378] In one embodiment, the IFNG-saRNA of the present invention is an antisense sequence such as, but not limited to, SEQ ID NO: 1071, 1073, 1075, 1077, 1079, 1081, 1083, 1085, 1087, 1089, 4110, 4112, 4114, 4116, 4118, 4120, 4122, 4124, 4126, 4128, 4130, 4132, 4134, 4136, 4138, 4140, 4142, 4144, 4146, 4148, 4150, 4152, 4154, 4156, 4158, 4160, 4162, 4164, 4166, 4168, 4170, 4172, 4174, 4176, 4178, 4180, 4182, 4184, 4186, 4188, 4190, 4192, 4194, 4196, 4198, 4200, 4202, 4204, 4206 and 4208. As a non-limiting example, these IFNG-saRNA sequences may be used to modulate interferon gamma protein levels, treat aplastic anemia and/or reduce a patient's susceptibility to congenital HIV, hepatitis C virus, mycobacterium tuberculosis and tuberous sclerosis.

[0379] In one embodiment, the IFNG-saRNA of the present invention is an saRNA duplex. The saRNA duplex may be a pair of sense and antisense sequences such as, but not limited to, SEQ ID NOs: 1062 and 1071; SEQ ID NOs: 1064 and 1073; SEQ ID NOs: 1066 and 1075; SEQ ID NOs: 1068 and 1077; SEQ ID NOs: 1070 and 1079; SEQ ID NOs: 1080 and 1081; SEQ ID NOs: 1082 and 1083; SEQ ID NOs: 1084 and 1085; SEQ ID NOs: 1086 and 1087; SEQ ID NOs: 1088 and 1089; SEQ ID NOs: 4109 and 4110; SEQ ID NOs: 4111 and 4112; SEQ ID NOs: 4113 and 4114; SEQ ID NOs: 4115 and 4116; SEQ ID NOs: 4117 and 4118; SEQ ID NOs: 4119 and 4120; SEQ ID NOs: 4121 and 4122; SEQ ID NOs: 4123 and 4124; SEQ ID NOs: 4125 and 4126; SEQ ID NOs: 4127 and 4128; SEQ ID NOs: 4129 and 4130; SEQ ID NOs: 4131 and 4132; SEQ ID NOs: 4133 and 4134; SEQ ID NOs: 4135 and 4136; SEQ ID NOs: 4137 and 4138; SEQ ID NOs: 4139 and 4140; SEQ ID NOs: 4141 and 4142; SEQ ID NOs: 4143 and 4144; SEQ ID NOs: 4145 and 4146; SEQ ID NOs: 4147 and 4148; SEQ ID NOs: 4149 and 4150; SEQ ID NOs: 4151 and 4152; SEQ ID NOs: 4153 and 4154; SEQ ID NOs: 4155 and 4156; SEQ ID NOs: 4157 and 4158; SEQ ID NOs: 4159 and 4160; SEQ ID NOs: 4161 and 4162; SEQ ID NOs: 4163 and 4164; SEQ ID NOs: 4165 and 4166; SEQ ID NOs: 4167 and 4168; SEQ ID NOs: 4169 and 4170; SEQ ID NOs: 4171 and 4172; SEQ ID NOs: 4173 and 4174; SEQ ID NOs: 4175 and 4176; SEQ ID NOs: 4177 and 4178; SEQ ID NOs: 4179 and 4180; SEQ ID NOs: 4181 and 4182; SEQ ID NOs: 4183 and 4184; SEQ ID NOs: 4185 and 4186; SEQ ID NOs: 4187 and 4188; SEQ ID NOs: 4189 and 4190; SEQ ID NOs: 4191 and 4192; SEQ ID NOs: 4193 and 4194; SEQ ID NOs: 4195 and 4196; SEQ ID NOs: 4197 and 4198; SEQ ID NOs: 4199 and 4200; SEQ ID NOs: 4201 and 4202; SEQ ID NOs: 4203 and 4204; SEQ ID NOs: 4205 and 4206; SEQ ID NOs: 4207 and 4208. As a non-limiting example, these IFNG-saRNA sequences which are saRNA duplexes may be used to modulate interferon gamma protein levels, treat aplastic anemia and/or reduce a patient's susceptibility to congenital HIV, hepatitis C virus, mycobacterium tuberculosis and tuberous sclerosis.

### IL10 Gene

[0380] As another non-limiting example, provided is a method of modulating the expression of IL10 gene comprising administering saRNA of the present invention, wherein the saRNA targets an antisense RNA transcript of IL10 gene. These saRNAs are called IL10-saRNA. In one embodiment, the expression of IL10 gene is increased by at least 20, 30, 40%, or at least 45, 50, 55, 60, 65, 70, 75%, or at least 80% in the presence of the IL10-saRNA of the present invention compared to the expression of IL10 gene in the absence of the IL10-saRNA of the present invention. In a further embodiment, the expression of IL10 gene is increased by a factor of at least 2, 3, 4, 5, 6, 7, 8, 9, 10, or by a factor of at least 15, 20, 25, 30, 35, 40, 45, 50, or by a factor of at least 60, 70, 80, 90, 100, in the presence of the IL10-saRNA of the present invention compared to the expression of IL10 gene in the absence of the IL10-saRNA of the present invention. The modulation of the expression of 110 gene may be reflected or determined by the change of IL10 mRNA levels.

[0381] IL10-saRNAs may be single-stranded and comprise 14-30 nucleotides. The sequence of a single-stranded IL10-saRNA may have at least 60%, 70%, 80% or 90% identity with a sequence selected from the sequences of the antisense strands in Table 24-2. In one embodiment, the single-stranded saRNA comprises a sequence selected from the sequences of the antisense strands in Table 24-2. In one embodiment, the single-stranded IL10-saRNA may have a 3′ tail. The sequence of a single-stranded IL10-saRNA with a 3′ tail may have at least 60%, 70%, 80% or 90% identity with a sequence selected from the sequences of the antisense strands in Table 25. In one embodiment, the single-stranded saRNA comprises a sequence selected from the sequences of the antisense strands in Table 25.

[0382] IL10-saRNAs may be double-stranded. The two strands form a duplex and each strand comprises 14-30 nucleotides. The first strand of a double-stranded IL10-saRNA may have at least 60%, 70%, 80% or 90% identity with a sequence selected from the sequences of the antisense strands in Table 24-2. In one embodiment, the first strand of the double-stranded saRNA comprises a sequence selected from the sequences of the antisense strands in Table 24-2. The second strand of a double-stranded IL10-saRNA may have at least 60%, 70%, 80% or 90% identity with a sequence selected from the sequences of the sense strands in Table 24-2. In one embodiment, the second strand of the double-stranded saRNA comprises a sequence selected from the sequences of the sense strands in Table 24-2. In one embodiment, the double-stranded IL10-saRNA may have a 3′ overhang on each strand. The first strand of a double-stranded IL10-saRNA may have at least 60%, 70%, 80% or 90% identity with a sequence selected from the sequences of the antisense strands in Table 25. In one embodiment, the first strand of the double-stranded saRNA comprises a sequence selected from the sequences of the antisense strands in Table 25. The second strand of a double-stranded IL10-saRNA may have at least 60%, 70%, 80% or 90% identity with a sequence selected from the sequences of the sense strands in Table 25. In one embodiment, the second strand of the double-stranded saRNA comprises a sequence selected from the sequences of the sense strands in Table 25.

[0383] IL10-saRNAs may be modified or unmodified.

[0384] Table 24-1 describes the target gene, the targeted sequence, the genomic location of the targeted sequence and the relative location of IL10-saRNAs with no 3′ overhang. In Table 24-1, the targeted sequence is defined as a region on the template strand of the target gene which is identical to a region on the target antisense RNA transcript to which the antisense strand of an saRNA hybridizes. In Table 24-1, the relative location is the distance from the 5′ end of the targeted sequence to the TSS. A negative number represents a location upstream of the TSS and a positive number represents a location downstream of the TSS.

TABLE 24-1
Sequences of IL10-saRNAs (with no 3′ overhang)

| | | | | Genomic Location | |
|---|---|---|---|---|---|
| | Target | | Targeted | of the Targeted | Relative |
| saRNA ID | Gene | Targeted sequence | sequence ID | sequence | Location |
| IL10.NM_000572- | IL10 | ggaaagatcccagggatta | 1090 | chr1: 206945148 | 691 |
| Pr-4 | human | | | plus strand | |
| IL10.NM_000572- | IL10 | agaatgaaaccttggatta | 1091 | chr1: 206946715 | −876 |
| Pr-12 | human | | | plus strand | |
| IL10.NM_000572- | IL10 | ggctacctctcttagaata | 1092 | chr1: 206946056 | −217 |
| Pr-15 | human | | | plus strand | |
| IL10.NM_000572- | IL10 | cggagatctcgaagcatgt | 1093 | chr1: 206945646 | 193 |
| Pr-20 | human | | | plus strand | |
| IL10.NM_000572- | IL10 | tcctcagagtcaagttatt | 1094 | chr1: 206944951 | 888 |
| Pr-30 | human | | | plus strand | |
| IL10.NM_000572- | IL10 | ggaggagggttcttatagt | 1095 | chr1: 206945530 | 309 |
| Pr-32 | human | | | plus strand | |
| IL10.NM_000572- | IL10 | gaatcatactcacaaagaa | 1096 | chr 1: 206945602 | 237 |
| Pr-33 | human | | | plus strand | |
| IL10.NM_000572- | IL10 | cagtttagcttggaaagat | 1097 | chr1: 206945137 | 702 |
| Pr-34 | human | | | plus strand | |
| IL10.NM_000572- | IL10 | acaatgggattgagaaata | 1098 | chr1: 206946212 | −373 |
| Pr-37 | human | | | plus strand | |
| IL10.NM_000572- | IL10 | gctggagtctaaagtttaa | 1099 | chr 1: 206946773 | −934 |
| Pr-39 | human | | | plus strand | |
| IL10.NM_000572- | IL10 | agaggattcaacagtgatg | 1100 | chr 1: 206944906 | 933 |
| Pr-40 | human | | | plus strand | |

TABLE 24-2
Sequences of IL10-saRNAs (with no 3′ overhang)

| | | | | Antisense |
|---|---|---|---|---|
| saRNA ID | Sense (passenger) | Sense SEQ ID | Antisense (guide) | SEQ ID |
| IL10.NM_000572- | GGAAAGAUCCCA | 1101 | UAAUCCCUGGGAU | 1102 |
| Pr-4 | GGGAUUA | | CUUUCC | |
| IL10.NM_000572- | AGAAUGAAACCU | 1103 | UAAUCCAAGGUUU | 1104 |
| Pr-12 | UGGAUUA | | CAUUCU | |
| IL10.NM_000572- | GGCUACCUCUCU | 1105 | UAUUCUAAGAGAG | 1106 |
| Pr-15 | UAGAAUA | | GUAGCC | |
| IL10.NM_000572- | CGGAGAUCUCGA | 1107 | ACAUGCUUCGAGA | 1108 |
| Pr-20 | AGCAUGU | | UCUCCG | |
| IL10.NM_000572- | UCCUCAGAGUCA | 1109 | AAUAACUUGACUC | 1110 |
| Pr-30 | AGUUAUU | | UGAGGA | |
| IL10.NM_000572- | GGAGGAGGGUUC | 1111 | ACUAUAAGAACCC | 1112 |
| Pr-32 | UUAUAGU | | UCCUCC | |
| IL10.NM_000572- | GAAUCAUACUCA | 1113 | UUCUUUGUGAGUA | 1114 |
| Pr-33 | CAAAGAA | | UGAUUC | |
| IL10.NM_000572- | CAGUUUAGCUUG | 1115 | AUCUUUCCAAGCU | 1116 |
| Pr-34 | GAAAGAU | | AAACUG | |
| IL10.NM_000572- | ACAAUGGGAUUG | 1117 | UAUUUCUCAAUCC | 1118 |
| Pr-37 | AGAAAUA | | CAUUGU | |
| IL10.NM_000572- | GCUGGAGUCUAA | 1119 | UUAAACUUUAGAC | 1120 |
| Pr-39 | AGUUUAA | | UCCAGC | |
| IL10.NM_000572- | AGAGGAUUCAAC | 1121 | CAUCACUGUUGAA | 1122 |
| Pr-40 | AGUGAUG | | UCCUCU | |

TABLE 25
Sequences of IL 10-saRNAs (with 3′ overhang)

| | | | | Antisense |
|---|---|---|---|---|
| saRNA ID | Sense (passenger) | Sense SEQ ID | Antisense (guide) | SEQ ID |
| IL10.NM_000572- | GGAAAGAUCCCAG | 1123 | UAAUCCCUGGGAU | 1124 |
| Pr-4′ | GGAUUAUU | | CUUUCCUU | |
| IL10.NM_000572- | AGAAUGAAACCU | 1125 | UAAUCCAAGGUUU | 1126 |
| Pr-12′ | UGGAUUAUU | | CAUUCUUU | |
| IL10.NM_000572- | GGCUACCUCUCUU | 1127 | UAUUCUAAGAGAG | 1128 |
| Pr-15′ | AGAAUAUU | | GUAGCCUU | |
| IL10.NM_000572- | CGGAGAUCUCGAA | 1129 | ACAUGCUUCGAGA | 1130 |
| Pr-20′ | GCAUGUUU | | UCUCCGUU | |
| IL10.NM_000572- | UCCUCAGAGUCAA | 1131 | AAUAACUUGACUC | 1132 |
| Pr-30′ | GUUAUUUU | | UGAGGAUU | |
| IL10.NM_000572- | GGAGGAGGGUUC | 1133 | ACUAUAAGAACCC | 1134 |
| Pr-32′ | UUAUAGUUU | | UCCUCCUU | |
| IL10.NM_000572- | GAAUCAUACUCAC | 1135 | UUCUUUGUGAGUA | 1136 |
| Pr-33′ | AAAGAAUU | | UGAUUCUU | |
| IL10.NM_000572- | CAGUUUAGCUUG | 1137 | AUCUUUCCAAGCU | 1138 |
| Pr-34′ | GAAAGAUUU | | AAACUGUU | |
| IL10.NM_000572- | ACAAUGGGAUUG | 1139 | UAUUUCUCAAUCC | 1140 |
| Pr-37′ | AGAAAUAUU | | CAUUGUUU | |
| IL10.NM_000572- | GCUGGAGUCUAA | 1141 | UUAAACUUUAGAC | 1142 |
| Pr-39′ | AGUUUAAUU | | UCCAGCUU | |
| IL10.NM_000572- | AGAGGAUUCAAC | 1143 | CAUCACUGUUGAA | 1144 |
| Pr-40′ | AGUGAUGUU | | UCCUCUUU | |

[0385] IL10 gene encodes interleukin 10 protein which is a cytokine produced primarily by monocytes and also by lymphocytes. IL10 protein is important in immunoregulation and inflammation. It down-regulates the expression of Thl cytokines, MHC class II Ags, and costimulatory molecules on macrophages. It also enhances B cell survival, proliferation, and antibody production. It can block NF-kappa B activity, and is involved in the regulation of the JAK-STAT signaling pathway. Mutations in 110 gene cause increased susceptibility to congenital HIV, graft-versus-host disease, and rheumatoid arthritis (Lard et al., Arthritis & Rheumatism, vol. 48 (7): 1841 (2003), the contents of which are incorporated herein by reference in their entirety).

[0386] In one embodiment, provided is a method of modulating interleukin 10 protein levels comprising administering IL10-saRNA of the present invention, wherein the IL10-saRNA targets an antisense RNA transcript of IL10 gene. In one embodiment, interferon gamma protein level is increased by at least 20, 30, 40%, or at least 45, 50, 55, 60, 65, 70, 75%, or at least 80% in the presence of the IL10-saRNA of the present invention compared to interleukin 10 protein level in the absence of the IL10-saRNA of the present invention. In a further embodiment, interleukin 10 protein level is increased by a factor of at least 2, 3, 4, 5, 6, 7, 8, 9, 10, or by a factor of at least 15, 20, 25, 30, 35, 40, 45, 50, or by a factor of at least 60, 70, 80, 90, 100, in the presence of the IL10-saRNA of the present invention compared to interleukin 10 protein level in the absence of the IL10-saRNA of the present invention.

[0387] In another embodiment, provided is a method of reducing a patient's susceptibility to congenital HIV or graft-versus-host disease, comprising administering the IL10-saRNA of the present invention to a patient in need thereof, wherein the IL10-saRNA targets an antisense RNA transcript of IL10 gene.

[0388] In another embodiment, provided is a method of treating graft-versus-host disease or rheumatoid arthritis comprising administering IL10-saRNA of the present invention, wherein the IL10-saRNA targets an antisense RNA transcript of IL10 gene, and wherein the symptoms of graft-versus-host disease or rheumatoid arthritis are reduced.

[0389] In one embodiment, the IL10-saRNA of the present invention is an antisense sequence such as, but not limited to, SEQ ID NO: 1102, 1104, 1106, 1108, 1110, 1112, 1114, 1116, 1118, 1120, 1122, 1124, 1126, 1128, 1130, 1132, 1134, 1136, 1138, 1140, 1142, 1144, 4210, 4212, 4214, 4216, 4218, 4220, 4222, 4224, 4226, 4228, 4230, 4232, 4234, 4236, 4238, 4240, 4242, 4244, 4246, 4248, 4250, 4252, 4254, 4256, 4258, 4260, 4262, 4264, 4266, 4268, 4270, 4272, 4274, 4276, 4278, 4280, 4282, 4284, 4286, 4288, 4290, 4292, 4294, 4296, 4298, 4300, 4302, 4304, 4306 and 4308. As a non-limiting example, these IL10-saRNA sequences may be used to modulate IL10 protein levels, treating graft-versus-host disease or rheumatoid arthritis and/or reduce a patient's susceptibility to congenital HIV or graft-versus-host disease.

[0390] In one embodiment, the IL10-saRNA of the present invention is an saRNA duplex. The saRNA duplex may be a pair of sense and antisense sequences such as, but not limited to, SEQ ID NOs: 1101 and 1102; SEQ ID NOs: 1103 and 1104; SEQ ID NOs: 1105 and 1106; SEQ ID NOs: 1107 and 1108; SEQ ID NOs: 1109 and 1110; SEQ ID NOs: 1111 and 1112; SEQ ID NOs: 1113 and 1114; SEQ ID NOs: 1115 and 1116; SEQ ID NOs: 1117 and 1118; SEQ ID NOs: 1119 and 1120; SEQ ID NOs: 1121 and 1122; SEQ ID NOs: 1123 and 1124; SEQ ID NOs: 1125 and 1126; SEQ ID NOs: 1127 and 1128; SEQ ID NOs: 1129 and 1130; SEQ ID NOs: 1131 and 1132; SEQ ID NOs: 1133 and 1134; SEQ ID NOs: 1135 and 1136; SEQ ID NOs: 1137 and 1138; SEQ ID NOs: 1139 and 1140; SEQ ID NOs: 1141 and 1142; SEQ ID NOs: 1143 and 1144; SEQ ID NOs: 4209 and 4210; SEQ ID NOs: 4211 and 4212; SEQ ID NOs: 4213 and 4214; SEQ ID NOs: 4215 and 4216; SEQ ID NOs: 4217 and 4218; SEQ ID NOs: 4219 and 4220; SEQ ID NOs: 4221 and 4222; SEQ ID NOs: 4223 and 4224; SEQ ID NOs: 4225 and 4226; SEQ ID NOs: 4227 and 4228; SEQ ID NOs: 4229 and 4230; SEQ ID NOs: 4231 and 4232; SEQ ID NOs: 4233 and 4234; SEQ ID NOs: 4235 and 4236; SEQ ID NOs: 4237 and 4238; SEQ ID NOs: 4239 and 4240; SEQ ID NOs: 4241 and 4242; SEQ ID NOs: 4243 and 4244; SEQ ID NOs: 4245 and 4246; SEQ ID NOs: 4247 and 4248; SEQ ID NOs: 4249 and 4250; SEQ ID NOs: 4251 and 4252; SEQ ID NOs: 4253 and 4254; SEQ ID NOs: 4255 and 4256; SEQ ID NOs: 4257 and 4258; SEQ ID NOs: 4259 and 4260; SEQ ID NOs: 4261 and 4262; SEQ ID NOs: 4263 and 4264; SEQ ID NOs: 4265 and 4266; SEQ ID NOs: 4267 and 4268; SEQ ID NOs: 4269 and 4270; SEQ ID NOs: 4271 and 4272; SEQ ID NOs: 4273 and 4274; SEQ ID NOs: 4275 and 4276; SEQ ID NOs: 4277 and 4278; SEQ ID NOs: 4279 and 4280; SEQ ID NOs: 4281 and 4282; SEQ ID NOs: 4283 and 4284; SEQ ID NOs: 4285 and 4286; SEQ ID NOs: 4287 and 4288; SEQ ID NOs: 4289 and 4290; SEQ ID NOs: 4291 and 4292; SEQ ID NOs: 4293 and 4294; SEQ ID NOs: 4295 and 4296; SEQ ID NOs: 4297 and 4298; SEQ ID NOs: 4299 and 4300; SEQ ID NOs: 4301 and 4302; SEQ ID NOs: 4303 and 4304; SEQ ID NOs: 4305 and 4306; SEQ ID NOs: 4307 and 4308. As a non-limiting example, these IL10-saRNA sequences which are saRNA duplexes may be used to modulate IL10 protein levels, treating graft-versus-host disease or rheumatoid arthritis and/or reduce a patient's susceptibility to congenital HIV or graft-versus-host disease.

### IL2 Gene

[0391] As another non-limiting example, provided is a method of modulating the expression of IL2 gene comprising administering saRNA of the present invention, wherein the saRNA targets an antisense RNA transcript of IL2 gene. These saRNAs are called IL2-saRNA. In one embodiment, the expression of IL2 gene is increased by at least 20, 30, 40%, or at least 45, 50, 55, 60, 65, 70, 75%, or at least 80% in the presence of the IL2-saRNA of the present invention compared to the expression of IL2 gene in the absence of the IL2-saRNA of the present invention. In a further embodiment, the expression of IL2 gene is increased by a factor of at least 2, 3, 4, 5, 6, 7, 8, 9, 10, or by a factor of at least 15, 20, 25, 30, 35, 40, 45, 50, or by a factor of at least 60, 70, 80, 90, 100, in the presence of the IL2-saRNA of the present invention compared to the expression of 12 gene in the absence of the IL2-saRNA of the present invention. The modulation of the expression of 12 gene may be reflected or determined by the change of IL2 mRNA levels.

[0392] IL2-saRNAs may be single-stranded and comprise 14-30 nucleotides. The sequence of a single-stranded IL2-saRNA may have at least 60%, 70%, 80% or 90% identity with a sequence selected from the sequences of the antisense strands in Table 26-2. In one embodiment, the single-stranded saRNA comprises a sequence selected from the sequences of the antisense strands in Table 26-2. In one embodiment, the single-stranded IL2-saRNA may have a 3′ tail. The sequence of a single-stranded IL2-saRNA with a 3′ tail may have at least 60%, 70%, 80% or 90% identity with a sequence selected from the sequences of the antisense strands in Table 27. In one embodiment, the single-stranded saRNA comprises a sequence selected from the sequences of the antisense strands in Table 27.

[0393] IL2-saRNAs may be double-stranded. The two strands form a duplex and each strand comprises 14-30 nucleotides. The first strand of a double-stranded IL2-saRNA may have at least 60%, 70%, 80% or 90% identity with a sequence selected from the sequences of the antisense strands in Table 26-2. In one embodiment, the first strand of the double-stranded saRNA comprises a sequence selected from the sequences of the antisense strands in Table 26-2. The second strand of a double-stranded IL2-saRNA may have at least 60%, 70%, 80% or 90% identity with a sequence selected from the sequences of the sense strands in Table 26-2. In one embodiment, the second strand of the double-stranded saRNA comprises a sequence selected from the sequences of the sense strands in Table 26-2. In one embodiment, the double-stranded IL2-saRNA may have a 3′ overhang on each strand. The first strand of a double-stranded IL2-saRNA may have at least 60%, 70%, 80% or 90% identity with a sequence selected from the sequences of the antisense strands in Table 27. In one embodiment, the first strand of the double-stranded saRNA comprises a sequence selected from the sequences of the antisense strands in Table 27. The second strand of a double-stranded IL2-saRNA may have at least 60%, 70%, 80% or 90% identity with a sequence selected from the sequences of the sense strands in Table 27. In one embodiment, the second strand of the double-stranded saRNA comprises a sequence selected from the sequences of the sense strands in Table 27.

[0394] IL2-saRNAs may be modified or unmodified.

[0395] Table 26-1 describes the target gene, the targeted sequence, the genomic location of the targeted sequence and the relative location of IL2-saRNAs with no 3′ overhang. In Table 26-1, the targeted sequence is defined as a region on the template strand of the target gene which is identical to a region on the target antisense RNA transcript to which the antisense strand of an saRNA hybridizes. In Table 26-1, the relative location is the distance from the 5′ end of the targeted sequence to the TSS. A negative number represents a location upstream of the TSS and a positive number represents a location downstream of the TSS.

TABLE 26-1
Sequences of IL2-saRNAs (with no 3′ overhang)

| | | | Targeted | | |
|---|---|---|---|---|---|
| | Target | | sequence | Genomic Location of the | Relative |
| saRNA ID | Gene | Targeted sequence | ID | Targeted sequence | Location |
| IL2.NM_000586- | IL2 | gaattgtcttatcgataaa | 1145 | chr4: 123377045 plus strand | 605 |
| Pr-1 | human | | | | |
| IL2.NM_000586- | IL2 | aggtgatagctctaattca | 1146 | chr4: 123377871 plus strand | −221 |
| Pr-4 | human | | | | |
| IL2.NM_000586- | IL2 | ggtgatagctctaattcat | 1147 | chr4: 123377872 plus strand | −222 |
| Pr-5 | human | | | | |
| IL2.NM_000586- | IL2 | gaaatgatctccagctaga | 1148 | chr4: 123377386 plus strand | 264 |
| Pr-11 | human | | | | |
| IL2.NM_000586- | IL2 | ttagaattgtcttatcgat | 1149 | chr4: 123377042 plus strand | 608 |
| Pr-15 | human | | | | |

TABLE 26-2
Sequences of IL2-saRNAs (with no 3′ overhang)

| | | Sense SEQ | | Antisense |
|---|---|---|---|---|
| saRNA ID | Sense (passenger) | ID | Antisense (guide) | SEQ ID |
| IL2.NM_000586- | GAAUUGUCUUAUCGAU | 1150 | UUUAUCGAUAAGACAA | 1151 |
| Pr-1 | AAA | | UUC | |
| IL2.NM_000586- | AGGUGAUAGCUCUAAU | 1152 | UGAAUUAGAGCUAUCA | 1153 |
| Pr-4 | UCA | | CCU | |
| IL2.NM_000586- | GGUGAUAGCUCUAAUU | 1154 | AUGAAUUAGAGCUAUC | 1155 |
| Pr-5 | CAU | | ACC | |
| IL2.NM_000586- | GAAAUGAUCUCCAGCU | 1156 | UCUAGCUGGAGAUCAU | 1157 |
| 586-Pr-11 | AGA | | UUC | |
| IL2.NM_000586 | UUAGAAUUGUCUUAUC | 1158 | AUCGAUAAGACAAUUC | 1159 |
| Pr-15 | GAU | | UAA | |

TABLE 27
Sequences of IL2-saRNAs (with 3′ overhang)

| | | Sense SEQ | | Antisense |
|---|---|---|---|---|
| saRNA ID | Sense (passenger) | ID | Antisense (guide) | SEQ ID |
| IL2.NM_000586- | GAAUUGUCUUAUCGA | 1160 | UUUAUCGAUAAGACAA | 1161 |
| Pr-1′ | UAAAUU | | UUCUU | |
| IL2.NM_000586- | AGGUGAUAGCUCUAA | 1162 | UGAAUUAGAGCUAUCA | 1163 |
| Pr-4′ | UUCAUU | | CCUUU | |
| IL2.NM_000586- | GGUGAUAGCUCUAAU | 1164 | AUGAAUUAGAGCUAUC | 1165 |
| Pr-5′ | UCAUUU | | ACCUU | |
| IL2.NM_000586- | GAAAUGAUCUCCAGC | 1166 | UCUAGCUGGAGAUCAU | 1167 |
| Pr-11′ | UAGAUU | | UUCUU | |
| IL2.NM_000586- | UUAGAAUUGUCUUAU | 1168 | AUCGAUAAGACAAUUC | 1169 |
| Pr-15′ | CGAUUU | | UAAUU | |

[0396] IL2 gene encodes interleukin 2, also known as T-cell growth factor, a secreted cytokine important for the proliferation of T and B lymphocytes. Interleukin 2 is produced by T-cells in response to antigenic or mitogenic stimulation. It is required for T-cell proliferation and other activities crucial to regulation of the immune response. It stimulates B-cells, monocytes, lymphokine-activated killer cells, natural killer cells, and glioma cells (Holbrook et al., Proc. Natl. Acad. Sci. USA, vol. 81:1634 (1984), the contents of which are incorporated herein by reference in their entirety). Mutations of IL2 gene may cause T-cell acute lymphoblastic leukemia.

[0397] In one embodiment, provided is a method of modulating interleukin 2 protein levels comprising administering IL2-saRNA of the present invention, wherein the IL2-saRNA targets an antisense RNA transcript of IL2 gene. In one embodiment, interferon gamma protein level is increased by at least 20, 30, 40%, or at least 45, 50, 55, 60, 65, 70, 75%, or at least 80% in the presence of the IL2-saRNA of the present invention compared to interleukin 2 protein level in the absence of the IL2-saRNA of the present invention. In a further embodiment, interleukin 2 protein level is increased by a factor of at least 2, 3, 4, 5, 6, 7, 8, 9, 10, or by a factor of at least 15, 20, 25, 30, 35, 40, 45, 50, or by a factor of at least 60, 70, 80, 90, 100, in the presence of the IL2-saRNA of the present invention compared to interleukin 2 protein level in the absence of the IL2-saRNA of the present invention.

[0398] In another embodiment, provided is a method of regulating T cell levels comprising administering IL2-saRNA of the present invention, wherein the IL2-saRNA targets an antisense RNA transcript of IL2 gene. In another embodiment, provided is a method of treating T-cell acute lymphoblastic leukemia, comprising administering IL2-saRNA of the present invention, wherein the IL2-saRNA targets an antisense RNA transcript of IL2 gene.

[0399] In one embodiment, the IL2-saRNA of the present invention is an antisense sequence such as, but not limited to, SEQ ID NO: 1151, 1153, 1155, 1157, 1159, 1161, 1163, 1165, 1167, 1169, 4510, 4512, 4514, 4516, 4518, 4520, 4522, 4524, 4526, 4528, 4530, 4532, 4534, 4536, 4538, 4540, 4542, 4544, 4546, 4548, 4550, 4552, 4554, 4556, 4558, 4560, 4562, 4564, 4566, 4568, 4570, 4572, 4574, 4576, 4578, 4580, 4582, 4584, 4586, 4588, 4590, 4592, 4594, 4596, 4598, 4600, 4602, 4604, 4606 and 4608. As a non-limiting example, these IL2-saRNA sequences may be used to modulate IL2 protein levels, regulating T cell levels and/or treating T-cell acute lymphoblastic leukemia.

[0400] In one embodiment, the IL2-saRNA of the present invention is an saRNA duplex. The saRNA duplex may be a pair of sense and antisense sequences such as, but not limited to, SEQ ID NOs: 1150 and 1151; SEQ ID NOs: 1152 and 1153; SEQ ID NOs: 1154 and 1155; SEQ ID NOs: 1156 and 1157; SEQ ID NOs: 1158 and 1159; SEQ ID NOs: 1160 and 1161; SEQ ID NOs: 1162 and 1163; SEQ ID NOs: 1164 and 1165; SEQ ID NOs: 1166 and 1167; SEQ ID NOs: 1168 and 1169; SEQ ID NOs: 4509 and 4510; SEQ ID NOs: 4511 and 4512; SEQ ID NOs: 4513 and 4514; SEQ ID NOs: 4515 and 4516; SEQ ID NOs: 4517 and 4518; SEQ ID NOs: 4519 and 4520; SEQ ID NOs: 4521 and 4522; SEQ ID NOs: 4523 and 4524; SEQ ID NOs: 4525 and 4526; SEQ ID NOs: 4527 and 4528; SEQ ID NOs: 4529 and 4530; SEQ ID NOs: 4531 and 4532; SEQ ID NOs: 4533 and 4534; SEQ ID NOs: 4535 and 4536; SEQ ID NOs: 4537 and 4538; SEQ ID NOs: 4539 and 4540; SEQ ID NOs: 4541 and 4542; SEQ ID NOs: 4543 and 4544; SEQ ID NOs: 4545 and 4546; SEQ ID NOs: 4547 and 4548; SEQ ID NOs: 4549 and 4550; SEQ ID NOs: 4551 and 4552; SEQ ID NOs: 4553 and 4554; SEQ ID NOs: 4555 and 4556; SEQ ID NOs: 4557 and 4558; SEQ ID NOs: 4559 and 4560; SEQ ID NOs: 4561 and 4562; SEQ ID NOs: 4563 and 4564; SEQ ID NOs: 4565 and 4566; SEQ ID NOs: 4567 and 4568; SEQ ID NOs: 4569 and 4570; SEQ ID NOs: 4571 and 4572; SEQ ID NOs: 4573 and 4574; SEQ ID NOs: 4575 and 4576; SEQ ID NOs: 4577 and 4578; SEQ ID NOs: 4579 and 4580; SEQ ID NOs: 4581 and 4582; SEQ ID NOs: 4583 and 4584; SEQ ID NOs: 4585 and 4586; SEQ ID NOs: 4587 and 4588; SEQ ID NOs: 4589 and 4590; SEQ ID NOs: 4591 and 4592; SEQ ID NOs: 4593 and 4594; SEQ ID NOs: 4595 and 4596; SEQ ID NOs: 4597 and 4598; SEQ ID NOs: 4599 and 4600; SEQ ID NOs: 4601 and 4602; SEQ ID NOs: 4603 and 4604; SEQ ID NOs: 4605 and 4606; SEQ ID NOs: 4607 and 4608. As a non-limiting example, these IL2-saRNA sequences which are saRNA duplexes may be used to modulate IL2 protein levels, regulating T cell levels and/or treating T-cell acute lymphoblastic leukemia.

### IL19 Gene

[0401] As another non-limiting example, provided is a method of modulating the expression of 1119 gene comprising administering saRNA of the present invention, wherein the saRNA targets an antisense RNA transcript of IL19 gene. These saRNAs are called IL19-saRNA. In one embodiment, the expression of IL19 gene is increased by at least 20, 30, 40%, or at least 45, 50, 55, 60, 65, 70, 75%, or at least 80% in the presence of the IL19-saRNA of the present invention compared to the expression of IL19 gene in the absence of the IL19-saRNA of the present invention. In a further embodiment, the expression of IL19 gene is increased by a factor of at least 2, 3, 4, 5, 6, 7, 8, 9, 10, or by a factor of at least 15, 20, 25, 30, 35, 40, 45, 50, or by a factor of at least 60, 70, 80, 90, 100, in the presence of the IL19-saRNA of the present invention compared to the expression of IL19 gene in the absence of the IL19-saRNA of the present invention. The modulation of the expression of IL19 gene may be reflected or determined by the change of IL19 mRNA levels.

[0402] IL19-saRNAs may be single-stranded and comprise 14-30 nucleotides. The sequence of a single-stranded IL19-saRNA may have at least 60%, 70%, 80% or 90% identity with a sequence selected from the sequences of the antisense strands in Table 28-2. In one embodiment, the single-stranded saRNA comprises a sequence selected from the sequences of the antisense strands in Table 28-2. In one embodiment, the single-stranded IL19-saRNA may have a 3′ tail. The sequence of a single-stranded IL19-saRNA with a 3′ tail may have at least 60%, 70%, 80% or 90% identity with a sequence selected from the sequences of the antisense strands in Table 29. In one embodiment, the single-stranded saRNA comprises a sequence selected from the sequences of the antisense strands in Table 29.

[0403] IL19-saRNAs may be double-stranded. The two strands form a duplex and each strand comprises 14-30 nucleotides. The first strand of a double-stranded IL19-saRNA may have at least 60%, 70%, 80% or 90% identity with a sequence selected from the sequences of the antisense strands in Table 28-2. In one embodiment, the first strand of the double-stranded saRNA comprises a sequence selected from the sequences of the antisense strands in Table 28-2. The second strand of a double-stranded IL19-saRNA may have at least 60%, 70%, 80% or 90% identity with a sequence selected from the sequences of the sense strands in Table 28-2. In one embodiment, the second strand of the double-stranded saRNA comprises a sequence selected from the sequences of the sense strands in Table 28-2. In one embodiment, the double-stranded IL19-saRNA may have a 3′ overhang on each strand. The first strand of a double-stranded IL19-saRNA may have at least 60%, 70%, 80% or 90% identity with a sequence selected from the sequences of the antisense strands in Table 29. In one embodiment, the first strand of the double-stranded saRNA comprises a sequence selected from the sequences of the antisense strands in Table 29. The second strand of a double-stranded IL19-saRNA may have at least 60%, 70%, 80% or 90% identity with a sequence selected from the sequences of the sense strands in Table 29. In one embodiment, the second strand of the double-stranded saRNA comprises a sequence selected from the sequences of the sense strands in Table 29.

[0404] IL19-saRNAs may be modified or unmodified.

[0405] Table 28-1 describes the target gene, the targeted sequence, the genomic location of the targeted sequence and the relative location of IL19-saRNAs with no 3′ overhang. In Table 28-1, the targeted sequence is defined as a region on the template strand of the target gene which is identical to a region on the target antisense RNA transcript to which the antisense strand of an saRNA hybridizes. In Table 28-1, the relative location is the distance from the 5′ end of the targeted sequence to the TSS. A negative number represents a location upstream of the TSS and a positive number represents a location downstream of the TSS.

TABLE 28-1
Sequences of IL19-saRNAs (with no 3′ overhang)

| | | | Targeted | | |
|---|---|---|---|---|---|
| | Target | | sequence | Genomic Location of the | Relative |
| saRNA ID | Gene | Targeted sequence | ID | Targeted sequence | Location |
| IL19.NM_013371- | IL19 | tgacgttatctctgagtaa | 1170 | chr1: 207001584 minus | −618 |
| Pr-2 | human | | | strand | |
| IL19.NM_013371- | IL19 | tgtttatctacctgaaatt | 1171 | chr1: 207002591 minus | 389 |
| Pr-8 | human | | | strand | |
| IL19.NM_013371- | IL19 | cgttatctctgagtaaagt | 1172 | chr1: 207001581 minus | −621 |
| Pr-15 | human | | | strand | |
| IL19.NM_013371- | IL19 | tggtggtgagcttagaaat | 1173 | chr1: 207001480 minus | −722 |
| Pr-20 | human | | | strand | |
| IL19.NM_013371- | IL19 | agagtagactcacactaat | 1174 | chr1: 207001385 minus | −817 |
| Pr-21 | human | | | strand | |
| IL19.NM_013371- | IL19 | tggtcaaagtctgttcaaa | 1175 | chr1: 207003187 minus | 985 |
| Pr-30 | human | | | strand | |
| IL19.NM_013371- | IL19 | gtcacatactcaagatgtt | 1176 | chr1: 207001889 minus | −313 |
| Pr-35 | human | | | strand | |
| IL19.NM_153758- | IL19 | agagagtcatcattacaaa | 1177 | chr1: 206972170 minus | −25 |
| Pr-1 | human | | | strand | |
| IL19.NM_153758- | IL19 | gctggtcccttgaattaaa | 1178 | chr1: 206972955 minus | 760 |
| Pr-7 | human | | | strand | |
| IL19.NM_153758- | IL19 | tggctggtcccttgaatta | 1179 | chr1: 206972957 minus | 762 |
| Pr-12 | human | | | strand | |
| IL19.NM_153758- | IL19 | ggctggtcccttgaattaa | 1180 | chr1: 206972956 minus | 761 |
| Pr-14 | human | | | strand | |
| IL19.NM_153758- | IL19 | ggctatagctgattggaaa | 1181 | chr1: 206973057 minus | 862 |
| Pr-24 | human | | | strand | |
| IL19.NM_153758- | IL19 | ggaactttatgacagacaa | 1182 | chr1: 206972475 minus | 280 |
| Pr-30 | human | | | strand | |
| IL19.NM_153758- | IL19 | ggtccctatagcagaaatt | 1183 | chr1: 206972357 minus | 162 |
| Pr-31 | human | | | strand | |
| IL19.NM_153758- | IL19 | gcagtcctgtcagttcata | 1184 | chr1: 206972454 minus | 259 |
| Pr-35 | human | | | strand | |
| IL19.NM_153758- | IL19 | tatgatcgcacctatgaat | 1185 | chr1: 206971546 minus | −649 |
| Pr-39 | human | | | strand | |

TABLE 28-2
Sequences of IL19-saRNAs (with no 3′ overhang)

| | | Sense SEQ | | Antisense SEQ |
|---|---|---|---|---|
| saRNA ID | Sense (passenger) | ID | Antisense (guide) | ID |
| IL19.NM_013371- | UGACGUUAUCUCU | 1186 | UUACUCAGAGAU | 1187 |
| Pr-2 | GAGUAA | | AACGUCA | |
| IL19.NM_013371- | UGUUUAUCUACCU | 1188 | AAUUUCAGGUA | 1189 |
| Pr-8 | GAAAUU | | GAUAAACA | |
| IL19.NM_013371- | CGUUAUCUCUGAG | 1190 | ACUUUACUCAGA | 1191 |
| Pr-15 | UAAAGU | | GAUAACG | |
| IL19.NM_013371- | UGGUGGUGAGCUU | 1192 | AUUUCUAAGCUC | 1193 |
| Pr-20 | AGAAAU | | ACCACCA | |
| IL19.NM_013371- | AGAGUAGACUCAC | 1194 | AUUAGUGUGAG | 1195 |
| Pr-21 | ACUAAU | | UCUACUCU | |
| IL19.NM_013371- | UGGUCAAAGUCUG | 1196 | UUUGAACAGACU | 1197 |
| Pr-30 | UUCAAA | | UUGACCA | |
| IL19.NM_013371- | GUCACAUACUCAAG | 1198 | AACAUCUUGAGU | 1199 |
| Pr-35 | AUGUU | | AUGUGAC | |
| IL19.NM_153758- | AGAGAGUCAUCAU | 1200 | UUUGUAAUGAU | 1201 |
| Pr-1 | UACAAA | | GACUCUCU | |
| IL19.NM_153758- | GCUGGUCCCUUGAA | 1202 | UUUAAUUCAAG | 1203 |
| Pr-7 | UUAAA | | GGACCAGC | |
| IL19.NM_153758- | UGGCUGGUCCCUUG | 1204 | UAAUUCAAGGG | 1205 |
| Pr-12 | AAUUA | | ACCAGCCA | |
| IL19.NM_153758- | GGCUGGUCCCUUGA | 1206 | UUAAUUCAAGG | 1207 |
| Pr-14 | AUUAA | | GACCAGCC | |
| IL19.NM_153758- | GGCUAUAGCUGAU | 1208 | UUUCCAAUCAGC | 1209 |
| Pr-24 | UGGAAA | | UAUAGCC | |
| IL19.NM_153758- | GGAACUUUAUGAC | 1210 | UUGUCUGUCAUA | 1211 |
| Pr-30 | AGACAA | | AAGUUCC | |
| IL19.NM_153758- | GGUCCCUAUAGCAG | 1212 | AAUUUCUGCUAU | 1213 |
| Pr-31 | AAAUU | | AGGGACC | |
| IL19.NM_153758- | GCAGUCCUGUCAGU | 1214 | UAUGAACUGACA | 1215 |
| Pr-35 | UCAUA | | GGACUGC | |
| IL19.NM_153758- | UAUGAUCGCACCUA | 1216 | AUUCAUAGGUGC | 1217 |
| Pr-39 | UGAAU | | GAUCAUA | |

TABLE 29
Sequences of IL19-saRNAs (with 3′ overhang)

| | | Sense SEQ | | Antisense SEQ |
|---|---|---|---|---|
| saRNA ID | Sense (passenger) | ID | Antisense (guide) | ID |
| IL19.NM_013371- | UGACGUUAUCUCU | 1218 | UUACUCAGAGAU | 1219 |
| Pr-2′ | GAGUAAUU | | AACGUCAUU | |
| IL19.NM_013371- | UGUUUAUCUACCU | 1220 | AAUUUCAGGUA | 1221 |
| Pr-8′ | GAAAUUUU | | GAUAAACAUU | |
| IL19.NM_013371- | CGUUAUCUCUGAG | 1222 | ACUUUACUCAGA | 1223 |
| Pr-15′ | UAAAGUUU | | GAUAACGUU | |
| IL19.NM_013371- | UGGUGGUGAGCUU | 1224 | AUUUCUAAGCUC | 1225 |
| Pr-20′ | AGAAAUUU | | ACCACCAUU | |
| IL19.NM_013371- | AGAGUAGACUCAC | 1226 | AUUAGUGUGAG | 1227 |
| Pr-21′ | ACUAAUUU | | UCUACUCUUU | |
| IL19.NM_013371- | UGGUCAAAGUCUG | 1228 | UUUGAACAGACU | 1229 |
| Pr-30′ | UUCAAAUU | | UUGACCAUU | |
| IL19.NM_013371- | GUCACAUACUCAAG | 1230 | AACAUCUUGAGU | 1231 |
| Pr-35′ | AUGUUUU | | AUGUGACUU | |
| IL19.NM_153758- | AGAGAGUCAUCAU | 1232 | UUUGUAAUGAU | 1233 |
| Pr-1′ | UACAAAUU | | GACUCUCUUU | |
| IL19.NM_153758- | GCUGGUCCCUUGAA | 1234 | UUUAAUUCAAG | 1235 |
| Pr-7′ | UUAAAUU | | GGACCAGCUU | |
| IL19.NM_153758- | UGGCUGGUCCCUUG | 1236 | UAAUUCAAGGG | 1237 |
| Pr-12′ | AAUUAUU | | ACCAGCCAUU | |
| IL19.NM_153758- | GGCUGGUCCCUUGA | 1238 | UUAAUUCAAGG | 1239 |
| Pr-14′ | AUUAAUU | | GACCAGCCUU | |
| IL19.NM_153758- | GGCUAUAGCUGAU | 1240 | UUUCCAAUCAGC | 1241 |
| Pr-24′ | UGGAAAUU | | UAUAGCCUU | |
| IL19.NM_153758- | GGAACUUUAUGAC | 1242 | UUGUCUGUCAUA | 1243 |
| Pr-30′ | AGACAAUU | | AAGUUCCUU | |
| IL19.NM_153758- | GGUCCCUAUAGCAG | 1244 | AAUUUCUGCUAU | 1245 |
| Pr-31′ | AAAUUUU | | AGGGACCUU | |
| IL19.NM_153758- | GCAGUCCUGUCAGU | 1246 | UAUGAACUGACA | 1247 |
| Pr-35′ | UCAUAUU | | GGACUGCUU | |
| IL19.NM_153758- | UAUGAUCGCACCUA | 1248 | AUUCAUAGGUGC | 1249 |
| Pr-39′ | UGAAUUU | | GAUCAUAUU | |

[0406] IL19gene encodes interleukin 19 which is a cytokine in IL10 cytokine family. Interleukin 10 binds the IL20 receptor complex and leads to the activation of the activation of the signal transducer and activator of transcription 3 (STAT3).

[0407] In one embodiment, provided is a method of modulating interleukin 19 protein levels comprising administering IL19-saRNA of the present invention, wherein the IL19-saRNA targets an antisense RNA transcript of 1119 gene. In one embodiment, interleukin 19 protein level is increased by at least 20, 30, 40%, or at least 45, 50, 55, 60, 65, 70, 75%, or at least 80% in the presence of the IL19-saRNA of the present invention compared to interleukin 19 protein level in the absence of the IL19-saRNA of the present invention. In a further embodiment, interleukin 19 protein level is increased by a factor of at least 2, 3, 4, 5, 6, 7, 8, 9, 10, or by a factor of at least 15, 20, 25, 30, 35, 40, 45, 50, or by a factor of at least 60, 70, 80, 90, 100, in the presence of the IL19-saRNA of the present invention compared to interleukin 19 protein level in the absence of the IL19-saRNA of the present invention.

[0408] In one embodiment, the IL19-saRNA of the present invention is an antisense sequence such as, but not limited to, SEQ ID NO: 1187, 1189, 1191, 1193, 1195, 1197, 1199, 1201, 1203, 1205, 1207, 1209, 1211, 1213, 1215, 1217, 1219, 1221, 1223, 1225, 1227, 1229, 1231, 1233, 1235, 1237, 1239, 1241, 1243, 1245, 1247, 1249, 4310, 4312, 4314, 4316, 4318, 4320, 4322, 4324, 4326, 4328, 4330, 4332, 4334, 4336, 4338, 4340, 4342, 4344, 4346, 4348, 4350, 4352, 4354, 4356, 4358, 4360, 4362, 4364, 4366, 4368, 4370, 4372, 4374, 4376, 4378, 4380, 4382, 4384, 4386, 4388, 4390, 4392, 4394, 4396, 4398, 4400, 4402, 4404, 4406, 4408, 4410, 4412, 4414, 4416, 4418, 4420, 4422, 4424, 4426, 4428, 4430, 4432, 4434, 4436, 4438, 4440, 4442, 4444, 4446, 4448, 4450, 4452, 4454, 4456, 4458, 4460, 4462, 4464, 4466, 4468, 4470, 4472, 4474, 4476, 4478, 4480, 4482, 4484, 4486, 4488, 4490, 4492, 4494, 4496, 4498, 4500, 4502, 4504, 4506 and 4508. As a non-limiting example, these IL19-saRNA sequences may be used to modulate IL19 protein levels.

[0409] In one embodiment, the IL19-saRNA of the present invention is an saRNA duplex. The saRNA duplex may be a pair of sense and antisense sequences such as, but not limited to, SEQ ID NOs: 1186 and 1187; SEQ ID NOs: 1188 and 1189; SEQ ID NOs: 1190 and 1191; SEQ ID NOs: 1192 and 1193; SEQ ID NOs: 1194 and 1195; SEQ ID NOs: 1196 and 1197; SEQ ID NOs: 1198 and 1199; SEQ ID NOs: 1200 and 1201; SEQ ID NOs: 1202 and 1203; SEQ ID NOs: 1204 and 1205; SEQ ID NOs: 1206 and 1207; SEQ ID NOs: 1208 and 1209; SEQ ID NOs: 1210 and 1211; SEQ ID NOs: 1212 and 1213; SEQ ID NOs: 1214 and 1215; SEQ ID NOs: 1216 and 1217; SEQ ID NOs: 1218 and 1219; SEQ ID NOs: 1220 and 1221; SEQ ID NOs: 1222 and 1223; SEQ ID NOs: 1224 and 1225; SEQ ID NOs: 1226 and 1227; SEQ ID NOs: 1228 and 1229; SEQ ID NOs: 1230 and 1231; SEQ ID NOs: 1232 and 1233; SEQ ID NOs: 1234 and 1235; SEQ ID NOs: 1236 and 1237; SEQ ID NOs: 1238 and 1239; SEQ ID NOs: 1240 and 1241; SEQ ID NOs: 1242 and 1243; SEQ ID NOs: 1244 and 1245; SEQ ID NOs: 1246 and 1247; SEQ ID NOs: 1248 and 1249; SEQ ID NOs: 4309 and 4310; SEQ ID NOs: 4311 and 4312; SEQ ID NOs: 4313 and 4314; SEQ ID NOs: 4315 and 4316; SEQ ID NOs: 4317 and 4318; SEQ ID NOs: 4319 and 4320; SEQ ID NOs: 4321 and 4322; SEQ ID NOs: 4323 and 4324; SEQ ID NOs: 4325 and 4326; SEQ ID NOs: 4327 and 4328; SEQ ID NOs: 4329 and 4330; SEQ ID NOs: 4331 and 4332; SEQ ID NOs: 4333 and 4334; SEQ ID NOs: 4335 and 4336; SEQ ID NOs: 4337 and 4338; SEQ ID NOs: 4339 and 4340; SEQ ID NOs: 4341 and 4342; SEQ ID NOs: 4343 and 4344; SEQ ID NOs: 4345 and 4346; SEQ ID NOs: 4347 and 4348; SEQ ID NOs: 4349 and 4350; SEQ ID NOs: 4351 and 4352; SEQ ID NOs: 4353 and 4354; SEQ ID NOs: 4355 and 4356; SEQ ID NOs: 4357 and 4358; SEQ ID NOs: 4359 and 4360; SEQ ID NOs: 4361 and 4362; SEQ ID NOs: 4363 and 4364; SEQ ID NOs: 4365 and 4366; SEQ ID NOs: 4367 and 4368; SEQ ID NOs: 4369 and 4370; SEQ ID NOs: 4371 and 4372; SEQ ID NOs: 4373 and 4374; SEQ ID NOs: 4375 and 4376; SEQ ID NOs: 4377 and 4378; SEQ ID NOs: 4379 and 4380; SEQ ID NOs: 4381 and 4382; SEQ ID NOs: 4383 and 4384; SEQ ID NOs: 4385 and 4386; SEQ ID NOs: 4387 and 4388; SEQ ID NOs: 4389 and 4390; SEQ ID NOs: 4391 and 4392; SEQ ID NOs: 4393 and 4394; SEQ ID NOs: 4395 and 4396; SEQ ID NOs: 4397 and 4398; SEQ ID NOs: 4399 and 4400; SEQ ID NOs: 4401 and 4402; SEQ ID NOs: 4403 and 4404; SEQ ID NOs: 4405 and 4406; SEQ ID NOs: 4407 and 4408; SEQ ID NOs: 4409 and 4410; SEQ ID NOs: 4411 and 4412; SEQ ID NOs: 4413 and 4414; SEQ ID NOs: 4415 and 4416; SEQ ID NOs: 4417 and 4418; SEQ ID NOs: 4419 and 4420; SEQ ID NOs: 4421 and 4422; SEQ ID NOs: 4423 and 4424; SEQ ID NOs: 4425 and 4426; SEQ ID NOs: 4427 and 4428; SEQ ID NOs: 4429 and 4430; SEQ ID NOs: 4431 and 4432; SEQ ID NOs: 4433 and 4434; SEQ ID NOs: 4435 and 4436; SEQ ID NOs: 4437 and 4438; SEQ ID NOs: 4439 and 4440; SEQ ID NOs: 4441 and 4442; SEQ ID NOs: 4443 and 4444; SEQ ID NOs: 4445 and 4446; SEQ ID NOs: 4447 and 4448; SEQ ID NOs: 4449 and 4450; SEQ ID NOs: 4451 and 4452; SEQ ID NOs: 4453 and 4454; SEQ ID NOs: 4455 and 4456; SEQ ID NOs: 4457 and 4458; SEQ ID NOs: 4459 and 4460; SEQ ID NOs: 4461 and 4462; SEQ ID NOs: 4463 and 4464; SEQ ID NOs: 4465 and 4466; SEQ ID NOs: 4467 and 4468; SEQ ID NOs: 4469 and 4470; SEQ ID NOs: 4471 and 4472; SEQ ID NOs: 4473 and 4474; SEQ ID NOs: 4475 and 4476; SEQ ID NOs: 4477 and 4478; SEQ ID NOs: 4479 and 4480; SEQ ID NOs: 4481 and 4482; SEQ ID NOs: 4483 and 4484; SEQ ID NOs: 4485 and 4486; SEQ ID NOs: 4487 and 4488; SEQ ID NOs: 4489 and 4490; SEQ ID NOs: 4491 and 4492; SEQ ID NOs: 4493 and 4494; SEQ ID NOs: 4495 and 4496; SEQ ID NOs: 4497 and 4498; SEQ ID NOs: 4499 and 4500; SEQ ID NOs: 4501 and 4502; SEQ ID NOs: 4503 and 4504; SEQ ID NOs: 4505 and 4506; SEQ ID NOs: 4507 and 4508. As a non-limiting example, these IL19-saRNA sequences which are saRNA duplexes may be used to modulate IL19 protein levels.

### LMX1A Gene

[0410] As another non-limiting example, provided is a method of modulating the expression of LMX1A gene comprising administering saRNA of the present invention, wherein the saRNA targets an antisense RNA transcript of LMX1A gene. These saRNAs are called LMX1A-saRNA. In one embodiment, the expression of LMX1A gene is increased by at least 20, 30, 40%, or at least 45, 50, 55, 60, 65, 70, 75%, or at least 80% in the presence of the LMX1A-saRNA of the present invention compared to the expression of LMX1A gene in the absence of the LMX1A-saRNA of the present invention. In a further embodiment, the expression of LMX1A gene is increased by a factor of at least 2, 3, 4, 5, 6, 7, 8, 9, 10, or by a factor of at least 15, 20, 25, 30, 35, 40, 45, 50, or by a factor of at least 60, 70, 80, 90, 100, in the presence of the LMX1A-saRNA of the present invention compared to the expression of LMX1A gene in the absence of the LMX1A-saRNA of the present invention. The modulation of the expression of LMX1A gene may be reflected or determined by the change of LMX1A mRNA levels.

[0411] LMX1A-saRNAs may be single-stranded and comprise 14-30 nucleotides. The sequence of a single-stranded LMX1A-saRNA may have at least 60%, 70%, 80% or 90% identity with a sequence selected from the sequences of the antisense strands in Table 30-2. In one embodiment, the single-stranded saRNA comprises a sequence selected from the sequences of the antisense strands in Table 30-2. In one embodiment, the single-stranded LMX1A-saRNA may have a 3′ tail. The sequence of a single-stranded LMX1A-saRNA with a 3′ tail may have at least 60%, 70%, 80% or 90% identity with a sequence selected from the sequences of the antisense strands in Table 31. In one embodiment, the single-stranded saRNA comprises a sequence selected from the sequences of the antisense strands in Table 31.

[0412] LMX1A-saRNAs may be double-stranded. The two strands form a duplex and each strand comprises 14-30 nucleotides. The first strand of a double-stranded LMX1A-saRNA may have at least 60%, 70%, 80% or 90% identity with a sequence selected from the sequences of the antisense strands in Table 30-2. In one embodiment, the first strand of the double-stranded saRNA comprises a sequence selected from the sequences of the antisense strands in Table 30-2. The second strand of a double-stranded LMX1A-saRNA may have at least 60%, 70%, 80% or 90% identity with a sequence selected from the sequences of the sense strands in Table 30-2. In one embodiment, the second strand of the double-stranded saRNA comprises a sequence selected from the sequences of the sense strands in Table 30-2. In one embodiment, the double-stranded LMX1A-saRNA may have a 3′ overhang on each strand. The first strand of a double-stranded LMX1A-saRNA may have at least 60%, 70%, 80% or 90% identity with a sequence selected from the sequences of the antisense strands in Table 31. In one embodiment, the first strand of the double-stranded saRNA comprises a sequence selected from the sequences of the antisense strands in Table 31. The second strand of a double-stranded LMX1A-saRNA may have at least 60%, 70%, 80% or 90% identity with a sequence selected from the sequences of the sense strands in Table 31. In one embodiment, the second strand of the double-stranded saRNA comprises a sequence selected from the sequences of the sense strands in Table 31.

[0413] LMX1A-saRNA may be modified or unmodified.

[0414] Table 30-1 describes the target gene, the targeted sequence, the genomic location of the targeted sequence and the relative location of LMX1A-saRNAs with no 3′ overhang. In Table 30-1, the targeted sequence is defined as a region on the template strand of the target gene which is identical to a region on the target antisense RNA transcript to which the antisense strand of an saRNA hybridizes. In Table 30-1, the relative location is the distance from the 5′ end of the targeted sequence to the TSS. A negative number represents a location upstream of the TSS and a positive number represents a location downstream of the TSS.

TABLE 30-1
Sequences of LMX1A-saRNAs (with no 3′ overhang)

| | | | | Genomic Location | |
|---|---|---|---|---|---|
| | Target | | Targeted | of the Targeted | Relative |
| saRNA ID | Gene | Targeted sequence | sequence ID | sequence | Location |
| LMX1A.NM_001174069- | LMX1A | ggatttatttgggtaggga | 1250 | chr1: 165324538 | 940 |
| Pr-3 | human | | | plus strand | |
| LMX1A.NM_001174069- | LMX1A | gggtatattgggtatataa | 1251 | chr1: 165325193 | 285 |
| Pr-9 | human | | | plus strand | |
| LMX1A.NM_001174069- | LMX1A | cctttaaggtcgaaccata | 1252 | chr1: 165326422 | −944 |
| Pr-13 | human | | | plus strand | |
| LMX1A.NM_001174069- | LMX1A | ctgtttagcgccagtagat | 1253 | chr1: 165326336 | −858 |
| Pr-17 | human | | | plus strand | |
| LMX1A.NM_001174069- | LMX1A | gctgtttagcgccagtaga | 1254 | chr1: 165326335 | −857 |
| Pr-19 | human | | | plus strand | |
| LMX1A.NM_001174069- | LMX1A | agagatcagtcacagcgaa | 1255 | chr1: 165324974 | 504 |
| Pr-24 | human | | | plus strand | |
| LMX1A.NM_001174069- | LMX1A | ggctcatgccagtttccaa | 1256 | chr1: 165326400 | −922 |
| Pr-26 | human | | | plus strand | |
| LMX1A.NM_001174069- | LMX1A | tgttggatttatttgggta | 1257 | chr1:165324534 | 944 |
| Pr-35 | human | | | plus strand | |
| LMX1A.NM_001174069- | LMX1A | Cggcttgttggatttattt | 1258 | chr1: 165324529 | 949 |
| Pr-40 | human | | | plus strand | |
| LMX1A.NM_177398- | LMX1A | gaatcatgctcttgggaga | 1259 | chr1: 165326484 | −532 |
| Pr-2 | human | | | plus strand | |
| LMX1A.NM_177398- | LMX1A | agttcaattcagtgtgatt | 1260 | chr1: 165326930 | −978 |
| Pr-6 | human | | | plus strand | |
| LMX1A.NM_177398- | LMX1A | ggccttatccgtctgtata | 1261 | chr1: 165326676 | −724 |
| Pr-9 | human | | | plus strand | |
| LMX1A.NM_177398- | LMX1A | agacaattgttgtcccaat | 1262 | chr1: 165326839 | −887 |
| Pr-11 | human | | | plus strand | |
| LMX1A.NM_177398- | LMX1A | gggtatattgggtatataa | 1263 | chr1: 165325193 | 759 |
| Pr-19 | human | | | plus strand | |
| LMX1A.NM_177398- | LMX1A | cctttaaggtcgaaccata | 1264 | chr1: 165326422 | −470 |
| Pr-26 | human | | | plus strand | |
| LMX1A.NM_177398- | LMX1A | ctgtttagcgccagtagat | 1265 | chr1:165326336 | −384 |
| Pr-30 | human | | | plus strand | |
| LMX1A.NM_177398- | LMX1A | gggaattcatggaatccga | 1266 | chr1: 165326880 | −928 |
| Pr-32 | human | | | plus strand | |
| LMX1A.NM_177398- | LMX1A | gcctaagaatcatgctctt | 1267 | chr1: 165326478 | −526 |
| Pr-33 | human | | | plus strand | |
| LMX1A.NM_177398- | LMX1A | Gctgtttagcgccagtaga | 1268 | chr1: 165326335 | −383 |
| Pr-35 | human | | | plus strand | |

TABLE 30-2
Sequences of LMX1A-saRNAs (with no 3′ overhang)

| | | Sense SEQ | | Antisense |
|---|---|---|---|---|
| saRNA ID | Sense (passenger) | ID | Antisense (guide) | SEQ ID |
| LMX1A.NM_001174069- | GGAUUUAUUUGGG | 1269 | UCCCUACCCAAAUAA | 1270 |
| Pr-3 | UAGGGA | | AUCC | |
| LMX1A.NM_001174069- | GGGUAUAUUGGGU | 1271 | UUAUAUACCCAAUAU | 1272 |
| Pr-9 | AUAUAA | | ACCC | |
| LMX1A.NM_001174069- | CCUUUAAGGUCGA | 1273 | UAUGGUUCGACCUUA | 1274 |
| Pr-13 | ACCAUA | | AAGG | |
| LMX1A.NM_001174069- | CUGUUUAGCGCCAG | 1275 | AUCUACUGGCGCUAA | 1276 |
| Pr-17 | UAGAU | | ACAG | |
| LMX1A.NM_001174069- | GCUGUUUAGCGCCA | 1277 | UCUACUGGCGCUAAA | 1278 |
| Pr-19 | GUAGA | | CAGC | |
| LMX1A.NM_001174069- | AGAGAUCAGUCAC | 1279 | UUCGCUGUGACUGAU | 1280 |
| Pr-24 | AGCGAA | | CUCU | |
| LMX1A.NM_001174069- | GGCUCAUGCCAGUU | 1281 | UUGGAAACUGGCAUG | 1282 |
| Pr-26 | UCCAA | | AGCC | |
| LMX1A.NM_001174069- | UGUUGGAUUUAUU | 1283 | UACCCAAAUAAAUCC | 1284 |
| Pr-35 | UGGGUA | | AACA | |
| LMX1A.NM_001174069- | CGGCUUGUUGGAU | 1285 | AAAUAAAUCCAACAA | 1286 |
| Pr-40 | UUAUUU | | GCCG | |
| LMX1A.NM_177398- | GAAUCAUGCUCUU | 1287 | UCUCCCAAGAGCAUG | 1288 |
| Pr-2 | GGGAGA | | AUUC | |
| LMX1A.NM_177398- | AGUUCAAUUCAGU | 1289 | AAUCACACUGAAUUG | 1290 |
| Pr-6 | GUGAUU | | AACU | |
| LMX1A.NM_177398- | GGCCUUAUCCGUCU | 1291 | UAUACAGACGGAUAA | 1292 |
| Pr-9 | GUAUA | | GGCC | |
| LMX1A.NM_177398- | AGACAAUUGUUGU | 1293 | AUUGGGACAACAAUU | 1294 |
| Pr-11 | CCCAAU | | GUCU | |
| LMX1A.NM_177398- | GGGUAUAUUGGGU | 1295 | UUAUAUACCCAAUAU | 1296 |
| Pr-19 | AUAUAA | | ACCC | |
| LMX1A.NM_177398- | CCUUUAAGGUCGA | 1297 | UAUGGUUCGACCUUA | 1298 |
| Pr-26 | ACCAUA | | AAGG | |
| LMX1A.NM_177398- | CUGUUUAGCGCCAG | 1299 | AUCUACUGGCGCUAA | 1300 |
| Pr-30 | UAGAU | | ACAG | |
| LMX1A.NM_177398- | GGGAAUUCAUGGA | 1301 | UCGGAUUCCAUGAAU | 1302 |
| Pr-32 | AUCCGA | | UCCC | |
| LMX1A.NM_177398- | GCCUAAGAAUCAU | 1303 | AAGAGCAUGAUUCUU | 1304 |
| Pr-33 | GCUCUU | | AGGC | |
| LMX1A.NM_177398- | GCUGUUUAGCGCCA | 1305 | UCUACUGGCGCUAAA | 1306 |
| Pr-35 | GUAGA | | CAGC | |

TABLE 31
Sequences of LMX1A-saRNAs (with 3′ overhang)

| | | Sense SEQ | | Antisense |
|---|---|---|---|---|
| saRNA ID | Sense (passenger) | ID | Antisense (guide) | SEQ ID |
| LMX1A.NM_001174069- | GGAUUUAUUUGGGU | 1307 | UCCCUACCCAAAUAA | 1308 |
| Pr-3′ | AGGGAUU | | AUCCUU | |
| LMX1A.NM_001174069- | GGGUAUAUUGGGUA | 1309 | UUAUAUACCCAAUAU | 1310 |
| Pr-9′ | UAUAAUU | | ACCCUU | |
| LMX1A.NM_001174069- | CCUUUAAGGUCGAAC | 1311 | UAUGGUUCGACCUUA | 1312 |
| Pr-13′ | CAUAUU | | AAGGUU | |
| LMX1A.NM_001174069- | CUGUUUAGCGCCAGU | 1313 | AUCUACUGGCGCUAA | 1314 |
| Pr-17′ | AGAUUU | | ACAGUU | |
| LMX1A.NM_001174069- | GCUGUUUAGCGCCAG | 1315 | UCUACUGGCGCUAAA | 1316 |
| Pr-19′ | UAGAUU | | CAGCUU | |
| LMX1A.NM_001174069- | AGAGAUCAGUCACA | 1317 | UUCGCUGUGACUGAU | 1318 |
| Pr-24′ | GCGAAUU | | CUCUUU | |
| LMX1A.NM_001174069- | GGCUCAUGCCAGUUU | 1319 | UUGGAAACUGGCAUG | 1320 |
| Pr-26′ | CCAAUU | | AGCCUU | |
| LMX1A.NM_001174069- | UGUUGGAUUUAUUU | 1321 | UACCCAAAUAAAUCC | 1322 |
| Pr-35′ | GGGUAUU | | AACAUU | |
| LMX1A.NM_001174069- | CGGCUUGUUGGAUU | 1323 | AAAUAAAUCCAACAA | 1324 |
| Pr-40′ | UAUUUUU | | GCCGUU | |
| LMX1A.NM_177398- | GAAUCAUGCUCUUG | 1325 | UCUCCCAAGAGCAUG | 1326 |
| Pr-2′ | GGAGAUU | | AUUCUU | |
| LMX1A.NM_177398- | AGUUCAAUUCAGUG | 1327 | AAUCACACUGAAUUG | 1328 |
| Pr-6′ | UGAUUUU | | AACUUU | |
| LMX1A.NM_177398- | GGCCUUAUCCGUCUG | 1329 | UAUACAGACGGAUAA | 1330 |
| Pr-9′ | UAUAUU | | GGCCUU | |
| LMX1A.NM_177398- | AGACAAUUGUUGUC | 1331 | AUUGGGACAACAAUU | 1332 |
| Pr-11′ | CCAAUUU | | GUCUUU | |
| LMX1A.NM_177398- | GGGUAUAUUGGGUA | 1333 | UUAUAUACCCAAUAU | 1334 |
| Pr-19′ | UAUAAUU | | ACCCUU | |
| LMX1A.NM_177398- | CCUUUAAGGUCGAAC | 1335 | UAUGGUUCGACCUUA | 1336 |
| Pr-26′ | CAUAUU | | AAGGUU | |
| LMX1A.NM_177398- | CUGUUUAGCGCCAGU | 1337 | AUCUACUGGCGCUAA | 1338 |
| Pr-30′ | AGAUUU | | ACAGUU | |
| LMX1A.NM_177398- | GGGAAUUCAUGGAA | 1339 | UCGGAUUCCAUGAAU | 1340 |
| Pr-32′ | UCCGAUU | | UCCCUU | |
| LMX1A.NM_177398- | GCCUAAGAAUCAUGC | 1341 | AAGAGCAUGAUUCUU | 1342 |
| Pr-33′ | UCUUUU | | AGGCUU | |
| LMX1A.NM_177398- | GCUGUUUAGCGCCAG | 1343 | UCUACUGGCGCUAAA | 1344 |
| Pr-35′ | UAGAUU | | CAGCUU | |

[0415] LMX1A gene encodes LIM homeobox transcription factor 1 alpha (LMX1A) protein, which is required for the development of midbrain dopaminergic neurons, roof plate formation, and cortical hem development (Nefzger et al, Stem Cells, vol. 30(7): 1349 (2012), the contents of which are incorporated herein by reference in their entirety). Mutations of LMX1A are associated with monogenic diabetes (Edghill et al., J of Pancreas, vol. 11 (1): 14 (2012), the contents of which are incorporated herein by reference in their entirety).

[0416] In one embodiment, provided is a method of modulating LMX1A protein levels comprising administering LMX1A-saRNA of the present invention, wherein the LMX1A-saRNA targets an antisense RNA transcript of LMX1A gene. In one embodiment, LMX1A protein level is increased by at least 20, 30, 40%, or at least 45, 50, 55, 60, 65, 70, 75%, or at least 80% in the presence of the LMX1A-saRNA of the present invention compared to LMX1A protein level in the absence of the LMX1A-saRNA of the present invention. In a further embodiment, LMX1A protein level is increased by a factor of at least 2, 3, 4, 5, 6, 7, 8, 9, 10, or by a factor of at least 15, 20, 25, 30, 35, 40, 45, 50, or by a factor of at least 60, 70, 80, 90, 100, in the presence of the LMX1A-saRNA of the present invention compared to LMX1A protein level in the absence of the LMX1A-saRNA of the present invention.

[0417] In another embodiment, provided is a method of treating monogenic diabetes comprising administering LMX1A-saRNA of the present invention, wherein the LMX1A-saRNA targets an antisense RNA transcript of LMX1A gene.

[0418] In one embodiment, the LMX1A-saRNA of the present invention is an antisense sequence such as, but not limited to, SEQ ID NO: 1270, 1272, 1274, 1276, 1278, 1280, 1282, 1284, 1286, 1288, 1290, 1292, 1294, 1296, 1298, 1300, 1302, 1304, 1306, 1308, 1310, 1312, 1314, 1316, 1318, 1320, 1322, 1324, 1326, 1328, 1330, 1332, 1334, 1336, 1338, 1340, 1342, 1344, 4710, 4712, 4714, 4716, 4718, 4720, 4722, 4724, 4726, 4728, 4730, 4732, 4734, 4736, 4738, 4740, 4742, 4744, 4746, 4748, 4750, 4752, 4754, 4756, 4758, 4760, 4762, 4764, 4766, 4768, 4770, 4772, 4774, 4776, 4778, 4780, 4782, 4784, 4786, 4788, 4790, 4792, 4794, 4796, 4798, 4800, 4802, 4804, 4806, 4808, 4810, 4812, 4814, 4816, 4818, 4820, 4822, 4824, 4826, 4828, 4830, 4832, 4834, 4836, 4838, 4840, 4842, 4844, 4846, 4848, 4850, 4852, 4854, 4856, 4858, 4860, 4862, 4864, 4866, 4868, 4870, 4872, 4874, 4876, 4878, 4880, 4882, 4884, 4886, 4888, 4890, 4892, 4894, 4896, 4898, 4900, 4902, 4904, 4906 and 4908. As a non-limiting example, these LMX1A-saRNA sequences may be used to modulate LMX1A protein levels and/or treat monogenic diabetes.

[0419] In one embodiment, the LMX1A-saRNA of the present invention is an saRNA duplex. The saRNA duplex may be a pair of sense and antisense sequences such as, but not limited to, SEQ ID NOs: 1269 and 1270; SEQ ID NOs: 1271 and 1272; SEQ ID NOs: 1273 and 1274; SEQ ID NOs: 1275 and 1276; SEQ ID NOs: 1277 and 1278; SEQ ID NOs: 1279 and 1280; SEQ ID NOs: 1281 and 1282; SEQ ID NOs: 1283 and 1284; SEQ ID NOs: 1285 and 1286; SEQ ID NOs: 1287 and 1288; SEQ ID NOs: 1289 and 1290; SEQ ID NOs: 1291 and 1292; SEQ ID NOs: 1293 and 1294; SEQ ID NOs: 1295 and 1296; SEQ ID NOs: 1297 and 1298; SEQ ID NOs: 1299 and 1300; SEQ ID NOs: 1301 and 1302; SEQ ID NOs: 1303 and 1304; SEQ ID NOs: 1305 and 1306; SEQ ID NOs: 1307 and 1308; SEQ ID NOs: 1309 and 1310; SEQ ID NOs: 1311 and 1312; SEQ ID NOs: 1313 and 1314; SEQ ID NOs: 1315 and 1316; SEQ ID NOs: 1317 and 1318; SEQ ID NOs: 1319 and 1320; SEQ ID NOs: 1321 and 1322; SEQ ID NOs: 1323 and 1324; SEQ ID NOs: 1325 and 1326; SEQ ID NOs: 1327 and 1328; SEQ ID NOs: 1329 and 1330; SEQ ID NOs: 1331 and 1332; SEQ ID NOs: 1333 and 1334; SEQ ID NOs: 1335 and 1336; SEQ ID NOs: 1337 and 1338; SEQ ID NOs: 1339 and 1340; SEQ ID NOs: 1341 and 1342; SEQ ID NOs: 1343 and 1344; SEQ ID NOs: 4709 and 4710; SEQ ID NOs: 4711 and 4712; SEQ ID NOs: 4713 and 4714; SEQ ID NOs: 4715 and 4716; SEQ ID NOs: 4717 and 4718; SEQ ID NOs: 4719 and 4720; SEQ ID NOs: 4721 and 4722; SEQ ID NOs: 4723 and 4724; SEQ ID NOs: 4725 and 4726; SEQ ID NOs: 4727 and 4728; SEQ ID NOs: 4729 and 4730; SEQ ID NOs: 4731 and 4732; SEQ ID NOs: 4733 and 4734; SEQ ID NOs: 4735 and 4736; SEQ ID NOs: 4737 and 4738; SEQ ID NOs: 4739 and 4740; SEQ ID NOs: 4741 and 4742; SEQ ID NOs: 4743 and 4744; SEQ ID NOs: 4745 and 4746; SEQ ID NOs: 4747 and 4748; SEQ ID NOs: 4749 and 4750; SEQ ID NOs: 4751 and 4752; SEQ ID NOs: 4753 and 4754; SEQ ID NOs: 4755 and 4756; SEQ ID NOs: 4757 and 4758; SEQ ID NOs: 4759 and 4760; SEQ ID NOs: 4761 and 4762; SEQ ID NOs: 4763 and 4764; SEQ ID NOs: 4765 and 4766; SEQ ID NOs: 4767 and 4768; SEQ ID NOs: 4769 and 4770; SEQ ID NOs: 4771 and 4772; SEQ ID NOs: 4773 and 4774; SEQ ID NOs: 4775 and 4776; SEQ ID NOs: 4777 and 4778; SEQ ID NOs: 4779 and 4780; SEQ ID NOs: 4781 and 4782; SEQ ID NOs: 4783 and 4784; SEQ ID NOs: 4785 and 4786; SEQ ID NOs: 4787 and 4788; SEQ ID NOs: 4789 and 4790; SEQ ID NOs: 4791 and 4792; SEQ ID NOs: 4793 and 4794; SEQ ID NOs: 4795 and 4796; SEQ ID NOs: 4797 and 4798; SEQ ID NOs: 4799 and 4800; SEQ ID NOs: 4801 and 4802; SEQ ID NOs: 4803 and 4804; SEQ ID NOs: 4805 and 4806; SEQ ID NOs: 4807 and 4808; SEQ ID NOs: 4809 and 4810; SEQ ID NOs: 4811 and 4812; SEQ ID NOs: 4813 and 4814; SEQ ID NOs: 4815 and 4816; SEQ ID NOs: 4817 and 4818; SEQ ID NOs: 4819 and 4820; SEQ ID NOs: 4821 and 4822; SEQ ID NOs: 4823 and 4824; SEQ ID NOs: 4825 and 4826; SEQ ID NOs: 4827 and 4828; SEQ ID NOs: 4829 and 4830; SEQ ID NOs: 4831 and 4832; SEQ ID NOs: 4833 and 4834; SEQ ID NOs: 4835 and 4836; SEQ ID NOs: 4837 and 4838; SEQ ID NOs: 4839 and 4840; SEQ ID NOs: 4841 and 4842; SEQ ID NOs: 4843 and 4844; SEQ ID NOs: 4845 and 4846; SEQ ID NOs: 4847 and 4848; SEQ ID NOs: 4849 and 4850; SEQ ID NOs: 4851 and 4852; SEQ ID NOs: 4853 and 4854; SEQ ID NOs: 4855 and 4856; SEQ ID NOs: 4857 and 4858; SEQ ID NOs: 4859 and 4860; SEQ ID NOs: 4861 and 4862; SEQ ID NOs: 4863 and 4864; SEQ ID NOs: 4865 and 4866; SEQ ID NOs: 4867 and 4868; SEQ ID NOs: 4869 and 4870; SEQ ID NOs: 4871 and 4872; SEQ ID NOs: 4873 and 4874; SEQ ID NOs: 4875 and 4876; SEQ ID NOs: 4877 and 4878; SEQ ID NOs: 4879 and 4880; SEQ ID NOs: 4881 and 4882; SEQ ID NOs: 4883 and 4884; SEQ ID NOs: 4885 and 4886; SEQ ID NOs: 4887 and 4888; SEQ ID NOs: 4889 and 4890; SEQ ID NOs: 4891 and 4892; SEQ ID NOs: 4893 and 4894; SEQ ID NOs: 4895 and 4896; SEQ ID NOs: 4897 and 4898; SEQ ID NOs: 4899 and 4900; SEQ ID NOs: 4901 and 4902; SEQ ID NOs: 4903 and 4904; SEQ ID NOs: 4905 and 4906; SEQ ID NOs: 4907 and 4908. As a non-limiting example, these LMX1A-saRNA sequences which are saRNA duplexes may be used to modulate LMX1A protein levels and/or treat monogenic diabetes.

### METRNL Gene

[0420] As another non-limiting example, provided is a method of modulating the expression of METRNL gene comprising administering saRNA of the present invention, wherein the saRNA targets an antisense RNA transcript of METRNL gene. These saRNAs are called METRNL-saRNA. In one embodiment, the expression of METRNL gene is increased by at least 20, 30, 40%, or at least 45, 50, 55, 60, 65, 70, 75%, or at least 80% in the presence of the METRNL-saRNA of the present invention compared to the expression of METRNL gene in the absence of the METRNL-saRNA of the present invention. In a further embodiment, the expression of METRNL gene is increased by a factor of at least 2, 3, 4, 5, 6, 7, 8, 9, 10, or by a factor of at least 15, 20, 25, 30, 35, 40, 45, 50, or by a factor of at least 60, 70, 80, 90, 100, in the presence of the METRNL-saRNA of the present invention compared to the expression of METRNL gene in the absence of the METRNL-saRNA of the present invention. The modulation of the expression of METRNL gene may be reflected or determined by the change of METRNL mRNA levels.

[0421] METRNL-saRNAs may be single-stranded and comprise 14-30 nucleotides. The sequence of a single-stranded METRNL-saRNA may have at least 60%, 70%, 80% or 90% identity with a sequence selected from the sequences of the antisense strands in Table 32-2. In one embodiment, the single-stranded saRNA comprises a sequence selected from the sequences of the antisense strands in Table 32-2. In one embodiment, the single-stranded METRNL-saRNA may have a 3′ tail. The sequence of a single-stranded METRNL-saRNA with a 3′ tail may have at least 60%, 70%, 80% or 90% identity with a sequence selected from the sequences of the antisense strands in Table 33. In one embodiment, the single-stranded saRNA comprises a sequence selected from the sequences of the antisense strands in Table 33.

[0422] METRNL-saRNAs may be double-stranded. The two strands form a duplex and each strand comprises 14-30 nucleotides. The first strand of a double-stranded METRNL-saRNA may have at least 60%, 70%, 80% or 90% identity with a sequence selected from the sequences of the antisense strands in Table 32-2. In one embodiment, the first strand of the double-stranded saRNA comprises a sequence selected from the sequences of the antisense strands in Table 32-2. The second strand of a double-stranded METRNL-saRNA may have at least 60%, 70%, 80% or 90% identity with a sequence selected from the sequences of the sense strands in Table 32-2. In one embodiment, the second strand of the double-stranded saRNA comprises a sequence selected from the sequences of the sense strands in Table 32-2. In one embodiment, the double-stranded METRNL-saRNA may have a 3′ overhang on each strand. The first strand of a double-stranded METRNL-saRNA may have at least 60%, 70%, 80% or 90% identity with a sequence selected from the sequences of the antisense strands in Table 33. In one embodiment, the first strand of the double-stranded saRNA comprises a sequence selected from the sequences of the antisense strands in Table 33. The second strand of a double-stranded METRNL-saRNA may have at least 60%, 70%, 80% or 90% identity with a sequence selected from the sequences of the sense strands in Table 33. In one embodiment, the second strand of the double-stranded saRNA comprises a sequence selected from the sequences of the sense strands in Table 33.

[0423] METRNL-saRNAs may be modified or unmodified.

[0424] Table 32-1 describes the target gene, the targeted sequence, the genomic location of the targeted sequence and the relative location of METRNL-saRNAs with no 3′ overhang. In Table 32-1, the targeted sequence is defined as a region on the template strand of the target gene which is identical to a region on the target antisense RNA transcript to which the antisense strand of an saRNA hybridizes. In Table 32-1, the relative location is the distance from the 5′ end of the targeted sequence to the TSS. A negative number represents a location upstream of the TSS and a positive number represents a location downstream of the TSS.

TABLE 32-1
Sequences of METRNL-saRNAs (with no 3′ overhang)

| | | | Targeted | | |
|---|---|---|---|---|---|
| | Target | | sequence | Genomic Location of | Relative |
| saRNA ID | Gene | Targeted sequence | ID | the Targeted sequence | Location |
| METRNL.NM_001004431- | METRNL | cgagtgtgttcctcggagt | 1345 | chr17: 81036603 minus | −944 |
| Pr-2 | human | | | strand | |
| METRNL.NM_001004431- | METRNL | caccgagtcagcagcgaat | 1346 | chr17: 81037324 minus | −223 |
| Pr-12 | human | | | strand | |
| METRNL.NM_001004431- | METRNL | gcgtcctgctcgagtgtgt | 1347 | chr17: 81036613 minus | −934 |
| Pr-18 | human | | | strand | |
| METRNL.NM_001004431- | METRNL | cgtcctgctcgagtgtgtt | 1348 | chr17: 81036612 minus | −935 |
| Pr-19 | human | | | strand | |
| METRNL.NM_001004431- | METRNL | ccgcactctgggtatcagt | 1349 | chr17: 81036728 minus | −819 |
| Pr-20 | human | | | strand | |
| METRNL.NM_001004431- | METRNL | gagttggtgcctcgggagt | 1350 | chr17: 81036942 minus | −605 |
| Pr-22 | human | | | strand | |
| METRNL.NM_001004431- | METRNL | agttggtgcctcgggagtt | 1351 | chr17: 81036941 minus | −606 |
| Pr-23 | human | | | strand | |
| METRNL.NM_001004431- | METRNL | ctctgcagatttggccaaa | 1352 | chr17: 81036675 minus | −872 |
| Pr-24 | human | | | strand | |
| METRNL.NM_001004431- | METRNL | ccgccgagcctctgaagtt | 1353 | chr17: 81037478 minus | −69 |
| Pr-25 | human | | | strand | |
| METRNL.NM_001004431- | METRNL | ctgaagttggcgagtccga | 1354 | chr17: 81037467 minus | −80 |
| Pr-31 | human | | | strand | |
| METRNL.NM_001004431- | METRNL | gagcgtcctgctcgagtgt | 1355 | chr17: 81036615 minus | −932 |
| Pr-33 | human | | | strand | |
| METRNL.NM_001004431- | METRNL | cgcgttccgcagagttggt | 1356 | chr17: 81036953 minus | −594 |
| Pr-35 | human | | | strand | |
| METRNL.NM_001004431- | METRNL | cagagttggtgcctcggga | 1357 | chr17: 81036944 minus | −603 |
| Pr-36 | human | | | strand | |
| METRNL.NM_001004431- | METRNL | tcgagtgtgttcctcggag | 1358 | chr17: 81036604 minus | −943 |
| Pr-38 | human | | | strand | |
| METRNL.NM_001004431- | METRNL | gtcctgctcgagtgtgttc | 1359 | chr17: 81036611 minus | −936 |
| Pr-40 | human | | | strand | |

TABLE 32-2
Sequences of METRNL-saRNAs (with no 3′ overhang)

| | | | | Antisense |
|---|---|---|---|---|
| saRNA ID | Sense (passenger) | Sense SEQ ID | Antisense (guide) | SEQ ID |
| METRNL.NM_001004431- | CGAGUGUGUUCCUC | 1361 | ACUCCGAGGAACAC | 1362 |
| Pr-2 | GGAGU | | ACUCG | |
| METRNL.NM_001004431- | CACCGAGUCAGCAG | 1363 | AUUCGCUGCUGACU | 1364 |
| Pr-12 | CGAAU | | CGGUG | |
| METRNL.NM_001004431- | GCGUCCUGCUCGAG | 1365 | ACACACUCGAGCAG | 1366 |
| Pr-18 | UGUGU | | GACGC | |
| METRNL.NM_001004431- | CGUCCUGCUCGAGU | 1367 | AACACACUCGAGCA | 1368 |
| Pr-19 | GUGUU | | GGACG | |
| METRNL.NM_001004431- | CCGCACUCUGGGUA | 1369 | ACUGAUACCCAGAG | 1370 |
| Pr-20 | UCAGU | | UGCGG | |
| METRNL.NM_001004431- | GAGUUGGUGCCUCG | 1371 | ACUCCCGAGGCACC | 1372 |
| Pr-22 | GGAGU | | AACUC | |
| METRNL.NM_001004431- | AGUUGGUGCCUCGG | 1373 | AACUCCCGAGGCAC | 1374 |
| Pr-23 | GAGUU | | CAACU | |
| METRNL.NM_001004431- | CUCUGCAGAUUUGG | 1375 | UUUGGCCAAAUCUG | 1376 |
| Pr-24 | CCAAA | | CAGAG | |
| METRNL.NM_001004431- | CCGCCGAGCCUCUG | 1377 | AACUUCAGAGGCUC | 1378 |
| Pr-25 | AAGUU | | GGCGG | |
| METRNL.NM_001004431- | CUGAAGUUGGCGAG | 1379 | UCGGACUCGCCAAC | 1380 |
| Pr-31 | UCCGA | | UUCAG | |
| METRNL.NM_001004431- | GAGCGUCCUGCUCG | 1381 | ACACUCGAGCAGGA | 1382 |
| Pr-33 | AGUGU | | CGCUC | |
| METRNL.NM_001004431- | CGCGUUCCGCAGAG | 1383 | ACCAACUCUGCGGA | 1384 |
| Pr-35 | UUGGU | | ACGCG | |
| METRNL.NM_001004431- | CAGAGUUGGUGCCU | 1385 | UCCCGAGGCACCAA | 1386 |
| Pr-36 | CGGGA | | CUCUG | |
| METRNL.NM_001004431- | UCGAGUGUGUUCCU | 1387 | CUCCGAGGAACACA | 1388 |
| Pr-38 | CGGAG | | CUCGA | |
| METRNL.NM_001004431- | GUCCUGCUCGAGUG | 1389 | GAACACACUCGAGC | 1390 |
| Pr-40 | UGUUC | | AGGAC | |

TABLE 33
Sequences of METRNL-saRNAs (with 3′ overhang)

| | | Sense SEQ | | Antisense |
|---|---|---|---|---|
| saRNA ID | Sense (passenger) | ID | Antisense (guide) | SEQ ID |
| METRNL.NM_001004431- | CGAGUGUGUUCCUCG | 1393 | ACUCCGAGGAACACACU | 1394 |
| Pr-2′ | GAGUUU | | CGUU | |
| METRNL.NM_001004431- | CACCGAGUCAGCAGC | 1395 | AUUCGCUGCUGACUCGG | 1396 |
| Pr-12′ | GAAUUU | | UGUU | |
| METRNL.NM_001004431- | GCGUCCUGCUCGAGU | 1397 | ACACACUCGAGCAGGAC | 1398 |
| Pr-18′ | GUGUUU | | GCUU | |
| METRNL.NM_001004431- | CGUCCUGCUCGAGUG | 1399 | AACACACUCGAGCAGGA | 1400 |
| Pr-19′ | UGUUUU | | CGUU | |
| METRNL.NM_001004431- | CCGCACUCUGGGUAU | 1401 | ACUGAUACCCAGAGUGC | 1402 |
| Pr-20′ | CAGUUU | | GGUU | |
| METRNL.NM_001004431- | GAGUUGGUGCCUCG | 1403 | ACUCCCGAGGCACCAAC | 1404 |
| Pr-22′ | GGAGUUU | | UCUU | |
| METRNL.NM_001004431- | AGUUGGUGCCUCGG | 1405 | AACUCCCGAGGCACCAA | 1406 |
| Pr-23′ | GAGUUUU | | CUUU | |
| METRNL.NM_001004431- | CUCUGCAGAUUUGGC | 1407 | UUUGGCCAAAUCUGCAG | 1408 |
| Pr-24′ | CAAAUU | | AGUU | |
| METRNL.NM_001004431- | CCGCCGAGCCUCUGA | 1409 | AACUUCAGAGGCUCGGC | 1410 |
| Pr-25′ | AGUUUU | | GGUU | |
| METRNL.NM_001004431- | CUGAAGUUGGCGAG | 1411 | UCGGACUCGCCAACUUC | 1412 |
| Pr-31′ | UCCGAUU | | AGUU | |
| METRNL.NM_001004431- | GAGCGUCCUGCUCGA | 1413 | ACACUCGAGCAGGACGC | 1414 |
| Pr-33′ | GUGUUU | | UCUU | |
| METRNL.NM_001004431- | CGCGUUCCGCAGAGU | 1415 | ACCAACUCUGCGGAACG | 1416 |
| Pr-35′ | UGGUUU | | CGUU | |
| METRNL.NM_001004431- | CAGAGUUGGUGCCUC | 1417 | UCCCGAGGCACCAACUC | 1418 |
| Pr-36′ | GGGAUU | | UGUU | |
| METRNL.NM_001004431- | UCGAGUGUGUUCCUC | 1419 | CUCCGAGGAACACACUC | 1420 |
| Pr-38′ | GGAGUU | | GAUU | |
| METRNL.NM_001004431- | GUCCUGCUCGAGUGU | 1421 | GAACACACUCGAGCAGG | 1422 |
| Pr-40′ | GUUCUU | | ACUU | |

[0425] METRNL gene is an important gene for neurogenesis. It is a latent process gene that induces expression during the latent process and is required for subsequent neurite extension (Watanabe et al., Journal of Cell Science, vol. 125:2198 (2012), the contents of which are incorporated herein by reference in their entirety). In one embodiment, provided is a method of regulating neurogenesis comprising administering METRNL-saRNA of the present invention, wherein the METRNL-saRNA targets an antisense RNA transcript of METRNL gene. In another embodiment, provided is a method of regulating latent process comprising administering METRNL-saRNA of the present invention, wherein the METRNL-saRNA targets an antisense RNA transcript of METRNL gene

[0426] In one embodiment, the METRNL-saRNA of the present invention is an antisense sequence such as, but not limited to, SEQ ID NO: 1362, 1364, 1366, 1368, 1370, 1372, 1374, 1376, 1378, 1380, 1382, 1384, 1386, 1388, 1390, 1394, 1396, 1398, 1400, 1402, 1404, 1406, 1408, 1410, 1412, 1414, 1416, 1418, 1420, 1422, 5076, 5078, 5080, 5082, 5084, 5086, 5088, 5090, 5092, 5094, 5096, 5098, 5100, 5102, 5104, 5106, 5108, 5110, 5112 and 5114. As a non-limiting example, these METRNL-saRNA sequences may be used to modulate METRNL protein levels, regulating neurogenesis and/or regulating latent process.

[0427] In one embodiment, the METRNL-saRNA of the present invention is an saRNA duplex. The saRNA duplex may be a pair of sense and antisense sequences such as, but not limited to, SEQ ID NOs: 1361 and 1362; SEQ ID NOs: 1363 and 1364; SEQ ID NOs: 1365 and 1366; SEQ ID NOs: 1367 and 1368; SEQ ID NOs: 1369 and 1370; SEQ ID NOs: 1371 and 1372; SEQ ID NOs: 1373 and 1374; SEQ ID NOs: 1375 and 1376; SEQ ID NOs: 1377 and 1378; SEQ ID NOs: 1379 and 1380; SEQ ID NOs: 1381 and 1382; SEQ ID NOs: 1383 and 1384; SEQ ID NOs: 1385 and 1386; SEQ ID NOs: 1387 and 1388; SEQ ID NOs: 1389 and 1390; SEQ ID NOs: 1393 and 1394; SEQ ID NOs: 1395 and 1396; SEQ ID NOs: 1397 and 1398; SEQ ID NOs: 1399 and 1400; SEQ ID NOs: 1401 and 1402; SEQ ID NOs: 1403 and 1404; SEQ ID NOs: 1405 and 1406; SEQ ID NOs: 1407 and 1408; SEQ ID NOs: 1409 and 1410; SEQ ID NOs: 1411 and 1412; SEQ ID NOs: 1413 and 1414; SEQ ID NOs: 1415 and 1416; SEQ ID NOs: 1417 and 1418; SEQ ID NOs: 1419 and 1420; SEQ ID NOs: 1421 and 1422; SEQ ID NOs: 5075 and 5076; SEQ ID NOs: 5077 and 5078; SEQ ID NOs: 5079 and 5080; SEQ ID NOs: 5081 and 5082; SEQ ID NOs: 5083 and 5084; SEQ ID NOs: 5085 and 5086; SEQ ID NOs: 5087 and 5088; SEQ ID NOs: 5089 and 5090; SEQ ID NOs: 5091 and 5092; SEQ ID NOs: 5093 and 5094; SEQ ID NOs: 5095 and 5096; SEQ ID NOs: 5097 and 5098; SEQ ID NOs: 5099 and 5100; SEQ ID NOs: 5101 and 5102; SEQ ID NOs: 5103 and 5104; SEQ ID NOs: 5105 and 5106; SEQ ID NOs: 5107 and 5108; SEQ ID NOs: 5109 and 5110; SEQ ID NOs: 5111 and 5112; SEQ ID NOs: 5113 and 5114. As a non-limiting example, these METRNL-saRNA sequences which are saRNA duplexes may be used to modulate METRNL protein levels, regulating neurogenesis and/or regulating latent process.

### NR4A2 Gene

[0428] As another non-limiting example, provided is a method of modulating the expression of NR4A2 gene comprising administering saRNA of the present invention, wherein the saRNA targets an antisense RNA transcript of NR4A2 gene. These saRNAs are called NR4A2-saRNA. In one embodiment, the expression of NR4A2 gene is increased by at least 20, 30, 40%, or at least 45, 50, 55, 60, 65, 70, 75%, or at least 80% in the presence of the NR4A2-saRNA of the present invention compared to the expression of NR4A2 gene in the absence of the NR4A2-saRNA of the present invention. In a further embodiment, the expression of NR4A2 gene is increased by a factor of at least 2, 3, 4, 5, 6, 7, 8, 9, 10, or by a factor of at least 15, 20, 25, 30, 35, 40, 45, 50, or by a factor of at least 60, 70, 80, 90, 100, in the presence of the NR4A2-saRNA of the present invention compared to the expression of NR4A2 gene in the absence of the NR4A2-saRNA of the present invention. The modulation of the expression of NR4A2 gene may be reflected or determined by the change of NR4A2 mRNA levels.

[0429] NR4A2-saRNAs may be single-stranded and comprise 14-30 nucleotides. The sequence of a single-stranded NR4A2-saRNA may have at least 60%, 70%, 80% or 90% identity with a sequence selected from the sequences of the antisense strands in Table 34-2. In one embodiment, the single-stranded saRNA comprises a sequence selected from the sequences of the antisense strands in Table 34-2. In one embodiment, the single-stranded NR4A2-saRNA may have a 3′ tail. The sequence of a single-stranded NR4A2-saRNA with a 3′ tail may have at least 60%, 70%, 80% or 90% identity with a sequence selected from the sequences of the antisense strands in Table 35. In one embodiment, the single-stranded saRNA comprises a sequence selected from the sequences of the antisense strands in Table 35.

[0430] NR4A2-saRNAs may be double-stranded. The two strands form a duplex and each strand comprises 14-30 nucleotides. The first strand of a double-stranded NR4A2-saRNA may have at least 60%, 70%, 80% or 90% identity with a sequence selected from the sequences of the antisense strands in Table 34-2. In one embodiment, the first strand of the double-stranded saRNA comprises a sequence selected from the sequences of the antisense strands in Table 34-2. The second strand of a double-stranded NR4A2-saRNA may have at least 60%, 70%, 80% or 90% identity with a sequence selected from the sequences of the sense strands in Table 34-2. In one embodiment, the second strand of the double-stranded saRNA comprises a sequence selected from the sequences of the sense strands in Table 34-2. In one embodiment, the double-stranded NR4A2-saRNA may have a 3′ overhang on each strand. The first strand of a double-stranded NR4A2-saRNA may have at least 60%, 70%, 80% or 90% identity with a sequence selected from the sequences of the antisense strands in Table 35. In one embodiment, the first strand of the double-stranded saRNA comprises a sequence selected from the sequences of the antisense strands in Table 35. The second strand of a double-stranded NR4A2-saRNA may have at least 60%, 70%, 80% or 90% identity with a sequence selected from the sequences of the sense strands in Table 35. In one embodiment, the second strand of the double-stranded saRNA comprises a sequence selected from the sequences of the sense strands in Table 35.

[0431] NR4A2-saRNAs may be modified or unmodified.

[0432] Table 34-1 describes the target gene, the targeted sequence, the genomic location of the targeted sequence and the relative location of NR4A2-saRNAs with no 3′ overhang. In Table 34-1, the targeted sequence is defined as a region on the template strand of the target gene which is identical to a region on the target antisense RNA transcript to which the antisense strand of an saRNA hybridizes. In Table 34-1, the relative location is the distance from the 5′ end of the targeted sequence to the TSS. A negative number represents a location upstream of the TSS and a positive number represents a location downstream of the TSS.

TABLE 34-1
Sequences of NR4A2-saRNAs (with no 3′ overhang)

| | | | | Genomic Location of | |
|---|---|---|---|---|---|
| | Target | | Targeted | the Targeted | Relative |
| saRNA ID | Gene | Targeted sequence | sequence ID | sequence | Location |
| NR4A2.NM_006186- | NR4A2 | agccggagttcgaacaaat | 1425 | chr2: 157188803 plus | 484 |
| Pr-5 | human | | | strand | |
| NR4A2.NM_006186- | NR4A2 | ggcatatattcattctaat | 1426 | chr2: 157189831 plus | −544 |
| Pr-6 | human | | | strand | |
| NR4A2.NM_006186- | NR4A2 | tcgatcttcgtttgaaaca | 1427 | chr2: 157190238 plus | −951 |
| Pr-7 | human | | | strand | |
| NR4A2.NM_006186- | NR4A2 | gtacagatgtcccatgaca | 1428 | chr2: 157189715 plus | −428 |
| Pr-10 | human | | | strand | |
| NR4A2.NM_006186- | NR4A2 | ggaataaatcgatcttcgt | 1429 | chr2: 157190230 plus | −943 |
| Pr-18 | human | | | strand | |
| NR4A2.NM_006186- | NR4A2 | atattctcgctctgataca | 1430 | chr2: 157188407 plus | 880 |
| Pr-22 | human | | | strand | |
| NR4A2.NM_006186- | NR4A2 | aaatcgatcttcgtttgaa | 1431 | chr2: 157190235 plus | −948 |
| Pr-29 | human | | | strand | |
| NR4A2.NM_006186- | NR4A2 | tggtatatttccgacctga | 1432 | chr2: 157189346 plus | −59 |
| Pr-31 | human | | | strand | |
| NR4A2.NM_006186- | NR4A2 | ctctaatactttcgatact | 1433 | chr2: 157190169 plus | −882 |
| Pr-32 | human | | | strand | |
| NR4A2.NM_006186- | NR4A2 | gatcttcgtttgaaacaca | 1434 | chr2: 157190240 plus | −953 |
| Pr-35 | human | | | strand | |
| NR4A2.NM_006186- | NR4A2 | ttcatattctcgctctgat | 1435 | chr2: 157188404 plus | 883 |
| Pr-38 | human | | | strand | |

TABLE 34-2
Sequences of NR4A2-saRNAs (with no 3′ overhang)

| | | | | Antisense |
|---|---|---|---|---|
| saRNA ID | Sense (passenger) | Sense SEQ ID | Antisense (guide) | SEQ ID |
| NR4A2.NM_006186- | AGCCGGAGUUCGAA | 1436 | AUUUGUUCGAACUCC | 1437 |
| Pr-5 | CAAAU | | GGCU | |
| NR4A2.NM_006186- | GGCAUAUAUUCAUU | 1438 | AUUAGAAUGAAUAU | 1439 |
| Pr-6 | CUAAU | | AUGCC | |
| NR4A2.NM_006186- | UCGAUCUUCGUUUG | 1440 | UGUUUCAAACGAAGA | 1441 |
| Pr-7 | AAACA | | UCGA | |
| NR4A2.NM_006186- | GUACAGAUGUCCCA | 1442 | UGUCAUGGGACAUCU | 1443 |
| Pr-10 | UGACA | | GUAC | |
| NR4A2.NM_006186- | GGAAUAAAUCGAUC | 1444 | ACGAAGAUCGAUUUA | 1445 |
| Pr-18 | UUCGU | | UUCC | |
| NR4A2.NM_006186- | AUAUUCUCGCUCUG | 1446 | UGUAUCAGAGCGAGA | 1447 |
| Pr-22 | AUACA | | AUAU | |
| NR4A2.NM_006186- | AAAUCGAUCUUCGU | 1448 | UUCAAACGAAGAUCG | 1449 |
| Pr-29 | UUGAA | | AUUU | |
| NR4A2.NM_006186- | UGGUAUAUUUCCGA | 1450 | UCAGGUCGGAAAUAU | 1451 |
| Pr-31 | CCUGA | | ACCA | |
| NR4A2.NM_006186- | CUCUAAUACUUUCG | 1452 | AGUAUCGAAAGUAU | 1453 |
| Pr-32 | AUACU | | UAGAG | |
| NR4A2.NM_006186- | GAUCUUCGUUUGAA | 1454 | UGUGUUUCAAACGAA | 1455 |
| Pr-35 | ACACA | | GAUC | |
| NR4A2.NM_006186- | UUCAUAUUCUCGCU | 1456 | AUCAGAGCGAGAAUA | 1457 |
| Pr-38 | CUGAU | | UGAA | |

TABLE 35
Sequences of NR4A2-saRNAs (with 3′ overhang)

| | | | | Antisense |
|---|---|---|---|---|
| saRNA ID | Sense (passenger) | Sense SEQ ID | Antisense (guide) | SEQ ID |
| NR4A2.NM_006186- | AGCCGGAGUUCGAA | 1458 | AUUUGUUCGAACUCC | 1459 |
| Pr-5 | CAAAUUU | | GGCUUU | |
| NR4A2.NM_006186- | GGCAUAUAUUCAUU | 1460 | AUUAGAAUGAAUAU | 1461 |
| Pr-6 | CUAAUUU | | AUGCCUU | |
| NR4A2.NM_006186- | UCGAUCUUCGUUUG | 1462 | UGUUUCAAACGAAGA | 1463 |
| Pr-7 | AAACAUU | | UCGAUU | |
| NR4A2.NM_006186- | GUACAGAUGUCCCA | 1464 | UGUCAUGGGACAUCU | 1465 |
| Pr-10 | UGACAUU | | GUACUU | |
| NR4A2.NM_006186- | GGAAUAAAUCGAUC | 1466 | ACGAAGAUCGAUUUA | 1467 |
| Pr-18 | UUCGUUU | | UUCCUU | |
| NR4A2.NM_006186- | AUAUUCUCGCUCUG | 1468 | UGUAUCAGAGCGAGA | 1469 |
| Pr-22 | AUACAUU | | AUAUUU | |
| NR4A2.NM_006186- | AAAUCGAUCUUCGU | 1470 | UUCAAACGAAGAUCG | 1471 |
| Pr-29 | UUGAAUU | | AUUUUU | |
| NR4A2.NM_006186- | UGGUAUAUUUCCGA | 1472 | UCAGGUCGGAAAUAU | 1473 |
| Pr-31 | CCUGAUU | | ACCAUU | |
| NR4A2.NM_006186- | CUCUAAUACUUUCG | 1474 | AGUAUCGAAAGUAUU | 1475 |
| Pr-32 | AUACUUU | | AGAGUU | |
| NR4A2.NM_006186- | GAUCUUCGUUUGAA | 1476 | UGUGUUUCAAACGAA | 1477 |
| Pr-35 | ACACAUU | | GAUCUU | |
| NR4A2.NM_006186- | UUCAUAUUCUCGCU | 1478 | AUCAGAGCGAGAAUA | 1479 |
| Pr-38 | CUGAUUU | | UGAAUU | |

[0433] NR4A2 gene, also called NURR1 gene, encodes nuclear receptor subfamily 4, group A, member 2 (NR4A2) protein, a member of the nuclear receptor family found in the brain and the adrenal gland. In the brain, NR4A2 protein plays a key role in prompting certain nerve cells to differentiate and produce a chemical messenger called dopamine. Dopamine transmits messages that help the brain control physical movement and emotional behavior. NR4A2 protein is associated with stress and addiction (Campos-Melo et al., Front. Mol. Neurosci., vol. 6:44 (2013), the contents of which are incorporated herein by reference in their entirety).

[0434] In one embodiment, provided is a method of modulating NR4A2 protein levels comprising administering NR4A2-saRNA of the present invention, wherein the NR4A2-saRNA targets an antisense RNA transcript of NR4A2 gene. In one embodiment, NR4A2 protein level is increased by at least 20, 30, 40%, or at least 45, 50, 55, 60, 65, 70, 75%, or at least 80% in the presence of the NR4A2-saRNA of the present invention compared to NR4A2 protein level in the absence of the NR4A2-saRNA of the present invention. In a further embodiment, NR4A2 protein level is increased by a factor of at least 2, 3, 4, 5, 6, 7, 8, 9, 10, or by a factor of at least 15, 20, 25, 30, 35, 40, 45, 50, or by a factor of at least 60, 70, 80, 90, 100, in the presence of the NR4A2-saRNA of the present invention compared to NR4A2 protein level in the absence of the NR4A2-saRNA of the present invention.

[0435] In another embodiment, provided is a method of regulating dopamine comprising administering NR4A2-saRNA of the present invention, wherein the NR4A2-saRNA targets an antisense RNA transcript of NR4A2 gene.

[0436] In another embodiment, provided is a method of reducing stress and addiction comprising administering NR4A2-saRNA of the present invention, wherein the NR4A2-saRNA targets an antisense RNA transcript of NR4A2 gene.

[0437] In one embodiment, the NR4A2-saRNA of the present invention is an antisense sequence such as, but not limited to, SEQ ID NO: 1437, 1439, 1441, 1443, 1445, 1447, 1449, 1451, 1453, 1455, 1457, 1459, 1461, 1463, 1465, 1467, 1469, 1471, 1473, 1475, 1477, 1479, 5116, 5118, 5120, 5122, 5124, 5126, 5128, 5130, 5132, 5134, 5136, 5138, 5140, 5142, 5144, 5146, 5148, 5150, 5152, 5154, 5156, 5158, 5160, 5162, 5164, 5166, 5168, 5170, 5172, 5174, 5176, 5178, 5180, 5182, 5184, 5186, 5188, 5190, 5192, 5194, 5196, 5198, 5200, 5202, 5204, 5206, 5208, 5210, 5212 and 5214. As a non-limiting example, these NR4A2-saRNA sequences may be used to modulate NR4A2 protein levels, regulating dopamine and/or reducing stress and addiction.

[0438] In one embodiment, the NR4A2-saRNA of the present invention is an saRNA duplex. The saRNA duplex may be a pair of sense and antisense sequences such as, but not limited to, SEQ ID NOs: 1436 and 1437; SEQ ID NOs: 1438 and 1439; SEQ ID NOs: 1440 and 1441; SEQ ID NOs: 1442 and 1443; SEQ ID NOs: 1444 and 1445; SEQ ID NOs: 1446 and 1447; SEQ ID NOs: 1448 and 1449; SEQ ID NOs: 1450 and 1451; SEQ ID NOs: 1452 and 1453; SEQ ID NOs: 1454 and 1455; SEQ ID NOs: 1456 and 1457; SEQ ID NOs: 1458 and 1459; SEQ ID NOs: 1460 and 1461; SEQ ID NOs: 1462 and 1463; SEQ ID NOs: 1464 and 1465; SEQ ID NOs: 1466 and 1467; SEQ ID NOs: 1468 and 1469; SEQ ID NOs: 1470 and 1471; SEQ ID NOs: 1472 and 1473; SEQ ID NOs: 1474 and 1475; SEQ ID NOs: 1476 and 1477; SEQ ID NOs: 1478 and 1479; SEQ ID NOs: 5115 and 5116; SEQ ID NOs: 5117 and 5118; SEQ ID NOs: 5119 and 5120; SEQ ID NOs: 5121 and 5122; SEQ ID NOs: 5123 and 5124; SEQ ID NOs: 5125 and 5126; SEQ ID NOs: 5127 and 5128; SEQ ID NOs: 5129 and 5130; SEQ ID NOs: 5131 and 5132; SEQ ID NOs: 5133 and 5134; SEQ ID NOs: 5135 and 5136; SEQ ID NOs: 5137 and 5138; SEQ ID NOs: 5139 and 5140; SEQ ID NOs: 5141 and 5142; SEQ ID NOs: 5143 and 5144; SEQ ID NOs: 5145 and 5146; SEQ ID NOs: 5147 and 5148; SEQ ID NOs: 5149 and 5150; SEQ ID NOs: 5151 and 5152; SEQ ID NOs: 5153 and 5154; SEQ ID NOs: 5155 and 5156; SEQ ID NOs: 5157 and 5158; SEQ ID NOs: 5159 and 5160; SEQ ID NOs: 5161 and 5162; SEQ ID NOs: 5163 and 5164; SEQ ID NOs: 5165 and 5166; SEQ ID NOs: 5167 and 5168; SEQ ID NOs: 5169 and 5170; SEQ ID NOs: 5171 and 5172; SEQ ID NOs: 5173 and 5174; SEQ ID NOs: 5175 and 5176; SEQ ID NOs: 5177 and 5178; SEQ ID NOs: 5179 and 5180; SEQ ID NOs: 5181 and 5182; SEQ ID NOs: 5183 and 5184; SEQ ID NOs: 5185 and 5186; SEQ ID NOs: 5187 and 5188; SEQ ID NOs: 5189 and 5190; SEQ ID NOs: 5191 and 5192; SEQ ID NOs: 5193 and 5194; SEQ ID NOs: 5195 and 5196; SEQ ID NOs: 5197 and 5198; SEQ ID NOs: 5199 and 5200; SEQ ID NOs: 5201 and 5202; SEQ ID NOs: 5203 and 5204; SEQ ID NOs: 5205 and 5206; SEQ ID NOs: 5207 and 5208; SEQ ID NOs: 5209 and 5210; SEQ ID NOs: 5211 and 5212; SEQ ID NOs: 5213 and 5214. As a non-limiting example, these NR4A2-saRNA sequences which are saRNA duplexes may be used to modulate NR4A2 protein levels, regulating dopamine and/or reducing stress and addiction.

### SIRT1 Gene

[0439] As another non-limiting example, provided is a method of modulating the expression of SIRTI gene comprising administering saRNA of the present invention, wherein the saRNA targets an antisense RNA transcript of SIRTI gene. These saRNAs are called SIRTI-saRNA. In one embodiment, the expression of SIRTI gene is increased by at least 20, 30, 40%, or at least 45, 50, 55, 60, 65, 70, 75%, or at least 80% in the presence of the SIRTI-saRNA of the present invention compared to the expression of SIRTI gene in the absence of the SIRTI-saRNA of the present invention. In a further embodiment, the expression of SIRT1 gene is increased by a factor of at least 2, 3, 4, 5, 6, 7, 8, 9, 10, or by a factor of at least 15, 20, 25, 30, 35, 40, 45, 50, or by a factor of at least 60, 70, 80, 90, 100, in the presence of the SIRTI-saRNA of the present invention compared to the expression of SIRTI gene in the absence of the SIRTI-saRNA of the present invention. The modulation of the expression of SIRTI gene may be reflected or determined by the change of SIRT1 mRNA levels.

[0440] SIRTI-saRNAs may be single-stranded and comprise 14-30 nucleotides. The sequence of a single-stranded SIRTI-saRNA may have at least 60%, 70%, 80% or 90% identity with a sequence selected from the sequences of the antisense strands in Table 36-2. In one embodiment, the single-stranded saRNA comprises a sequence selected from the sequences of the antisense strands in Table 36-2. In one embodiment, the single-stranded SIRTI-saRNA may have a 3′ tail. The sequence of a single-stranded SIRTI-saRNA with a 3′ tail may have at least 60%, 70%, 80% or 90% identity with a sequence selected from the sequences of the antisense strands in Table 37. In one embodiment, the single-stranded saRNA comprises a sequence selected from the sequences of the antisense strands in Table 37.

[0441] SIRTI-saRNAs may be double-stranded. The two strands form a duplex and each strand comprises 14-30 nucleotides. The first strand of a double-stranded SIRTI-saRNA may have at least 60%, 70%, 80% or 90% identity with a sequence selected from the sequences of the antisense strands in Table 36-2. In one embodiment, the first strand of the double-stranded saRNA comprises a sequence selected from the sequences of the antisense strands in Table 36-2. The second strand of a double-stranded SIRTI-saRNA may have at least 60%, 70%, 80% or 90% identity with a sequence selected from the sequences of the sense strands in Table 36-2. In one embodiment, the second strand of the double-stranded saRNA comprises a sequence selected from the sequences of the sense strands in Table 36-2. In one embodiment, the double-stranded SIRTI-saRNA may have a 3′ overhang on each strand. The first strand of a double-stranded SIRTI-saRNA may have at least 60%, 70%, 80% or 90% identity with a sequence selected from the sequences of the antisense strands in Table 37. In one embodiment, the first strand of the double-stranded saRNA comprises a sequence selected from the sequences of the antisense strands in Table 37. The second strand of a double-stranded SIRTI-saRNA may have at least 60%, 70%, 80% or 90% identity with a sequence selected from the sequences of the sense strands in Table 37. In one embodiment, the second strand of the double-stranded saRNA comprises a sequence selected from the sequences of the sense strands in Table 37.

[0442] SIRTI-saRNAs may be modified or unmodified.

[0443] Table 36-1 describes the target gene, the targeted sequence, the genomic location of the targeted sequence and the relative location of SIRTI-saRNAs with no 3′ overhang. In Table 36-1, the targeted sequence is defined as a region on the template strand of the target gene which is identical to a region on the target antisense RNA transcript to which the antisense strand of an saRNA hybridizes. In Table 36-1, the relative location is the distance from the 5′ end of the targeted sequence to the TSS. A negative number represents a location upstream of the TSS and a positive number represents a location downstream of the TSS.

TABLE 36-1
Sequences of SIRT1-saRNAs (with no 3′ overhang)

| | | | | Genomic Location | |
|---|---|---|---|---|---|
| | | Targeted | Targeted | of the Targeted | Relative |
| saRNA ID | Target Gene | sequence | sequence ID | sequence | Location |
| SIRT1.NM_001142498- | SIRT1 human | gacttagctccctg | 1480 | chr10: 69643986 | −933 |
| Pr-1 | | aaata | | minus strand | |
| SIRT1.NM_001142498- | SIRT1 human | agacttagctccct | 1481 | chr10: 69643987 | −932 |
| Pr-2 | | gaaat | | minus strand | |
| SIRT1.NM_001142498- | SIRT1 human | gcaagctgtgacta | 1482 | chr10: 69645435 | 516 |
| Pr-13 | | tagaa | | minus strand | |
| SIRT1.NM_001142498- | SIRT1 human | gtgttaagtttgtgt | 1483 | chr10: 69645628 | 709 |
| Pr-18 | | ctca | | minus strand | |
| SIRT1.NM_001142498- | SIRT1 human | gccttagccttgtct | 1484 | chr10: 69644041 | −878 |
| Pr-19 | | atat | | minus strand | |
| SIRT1.NM_001142498- | SIRT1 human | tgctagaagtgtta | 1485 | chr10: 69645636 | 717 |
| Pr-23 | | agttt | | minus strand | |
| SIRT1.NM_001142498- | SIRT1 human | cagccacgttcttta | 1486 | chr10: 69645456 | 537 |
| Pr-24 | | aatt | | minus strand | |
| SIRT1.NM_001142498- | SIRT1 human | ctgaaatacgttgg | 1487 | chr10: 69643975 | −944 |
| Pr-25 | | atagt | | minus strand | |
| SIRT1.NM_001142498- | SIRT1 human | aagtttgtgtctcaa | 1488 | chr10: 69645623 | 704 |
| Pr-26 | | tact | | minus strand | |
| SIRT1.NM_001142498- | SIRT1 human | gttggatagtcgttc | 1489 | chr10: 69643966 | −953 |
| Pr-34 | | tgtt | | minus strand | |
| SIRT1.NM_001142498- | SIRT1 human | agagcaagattag | 1490 | chr10: 69645556 | 637 |
| Pr-36 | | aataaa | | minus strand | |
| SIRT1.NM_001142498- | SIRT1 human | tgcattacagaatg | 1491 | chr10: 69645486 | 567 |
| Pr-37 | | gtaat | | minus strand | |
| SIRT1.NM_012238- | SIRT1 human | gacttagctccctg | 1492 | chr10: 69643986 | −421 |
| Pr-1 | | aaata | | minus strand | |
| SIRT1.NM_012238- | SIRT1 human | agacttagctccct | 1493 | chr10: 69643987 | −420 |
| Pr-2 | | gaaat | | minus strand | |
| SIRT1.NM_012238- | SIRT1 human | gcttcaaacgtgtg | 1494 | chr10: 69643695 | −712 |
| Pr-6 | | tgaat | | minus strand | |
| SIRT1.NM_012238- | SIRT1 human | gccttagccttgtct | 1495 | chr10: 69644041 | −366 |
| Pr-12 | | atat | | minus strand | |
| SIRT1.NM_012238- | SIRT1 human | agccgtdctaaact | 1496 | chr10: 69643532 | −875 |
| Pr-17 | | taat | | minus strand | |
| SIRT1.NM_012238- | SIRT1 human | ctgaaatacgttgg | 1497 | chr10: 69643975 | −432 |
| Pr-19 | | atagt | | minus strand | |
| SIRT1.NM_012238- | SIRT1 human | gttggatagtcgttc | 1498 | chr10: 69643966 | −441 |
| Pr-30 | | tgtt | | minus strand | |
| SIRT1.NM_012238- | SIRT1 human | tgccttagccttgtc | 1499 | chr10: 69644042 | −365 |
| Pr-38 | | tata | | minus strand | |
| SIRT1.NM_012238- | SIRT1 human | ctagccgtttctaaa | 1500 | chr10: 69643534 | −873 |
| Pr-39 | | ctta | | minus strand | |

TABLE 36-2
Sequences of SIRT1-saRNAs (with no 3′ overhang)

| | | Sense SEQ | | Anti-sense |
|---|---|---|---|---|
| saRNA ID | Sense (passenger) | ID | Antisense (guide) | SEQ ID |
| SIRT1.NM_001142498- | GACUUAGCUCCCUGAA | 1501 | UAUUUCAGGGAGC | 1502 |
| Pr-1 | AUA | | UAAGUC | |
| SIRT1.NM_001142498- | AGACUUAGCUCCCUGA | 1503 | AUUUCAGGGAGCU | 1504 |
| Pr-2 | AAU | | AAGUCU | |
| SIRT1.NM_001142498- | GCAAGCUGUGACUAUA | 1505 | UUCUAUAGUCACA | 1506 |
| Pr-13 | GAA | | GCUUGC | |
| SIRT1.NM_001142498- | GUGUUAAGUUUGUGUC | 1507 | UGAGACACAAACU | 1508 |
| Pr-18 | UCA | | UAACAC | |
| SIRT1.NM_001142498- | GCCUUAGCCUUGUCUA | 1509 | AUAUAGACAAGGC | 1510 |
| Pr-19 | UAU | | UAAGGC | |
| SIRT1.NM_001142498- | UGCUAGAAGUGUUAAG | 1511 | AAACUUAACACUU | 1512 |
| Pr-23 | UUU | | CUAGCA | |
| SIRT1.NM_001142498- | CAGCCACGUUCUUUAA | 1513 | AAUUUAAAGAACG | 1514 |
| Pr-24 | AUU | | UGGCUG | |
| SIRT1.NM_001142498- | CUGAAAUACGUUGGAU | 1515 | ACUAUCCAACGUA | 1516 |
| Pr-25 | AGU | | UUUCAG | |
| SIRT1.NM_001142498- | AAGUUUGUGUCUCAAU | 1517 | AGUAUUGAGACAC | 1518 |
| Pr-26 | ACU | | AAACUU | |
| SIRT1.NM_001142498- | GUUGGAUAGUCGUUCU | 1519 | AACAGAACGACUA | 1520 |
| Pr-34 | GUU | | UCCAAC | |
| SIRT1.NM_001142498- | AGAGCAAGAUUAGAAU | 1521 | UUUAUUCUAAUCU | 1522 |
| Pr-36 | AAA | | UGCUCU | |
| SIRT1.NM_001142498- | UGCAUUACAGAAUGGU | 1523 | AUUACCAUUCUGU | 1524 |
| Pr-37 | AAU | | AAUGCA | |
| SIRT1.NM_012238- | GACUUAGCUCCCUGAA | 1525 | UAUUUCAGGGAGC | 1526 |
| Pr-1 | AUA | | UAAGUC | |
| SIRT1.NM_012238- | AGACUUAGCUCCCUGA | 1527 | AUUUCAGGGAGCU | 1528 |
| Pr-2 | AAU | | AAGUCU | |
| SIRT1.NM_012238- | GCUUCAAACGUGUGUG | 1529 | AUUCACACACGUU | 1530 |
| Pr-6 | AAU | | UGAAGC | |
| SIRT1.NM_012238- | GCCUUAGCCUUGUCUA | 1531 | AUAUAGACAAGGC | 1532 |
| Pr-12 | UAU | | UAAGGC | |
| SIRT1.NM_012238- | AGCCGUUUCUAAACUU | 1533 | AUUAAGUUUAGAA | 1534 |
| Pr-17 | AAU | | ACGGCU | |
| SIRT1.NM_012238- | CUGAAAUACGUUGGAU | 1535 | ACUAUCCAACGUA | 1536 |
| Pr-19 | AGU | | UUUCAG | |
| SIRT1.NM_012238- | GUUGGAUAGUCGUUCU | 1537 | AACAGAACGACUA | 1538 |
| Pr-30 | GUU | | UCCAAC | |
| SIRT1.NM_012238- | UGCCUUAGCCUUGUCU | 1539 | UAUAGACAAGGCU | 1540 |
| Pr-38 | AUA | | AAGGCA | |
| SIRT1.NM_012238- | CUAGCCGUUUCUAAAC | 1541 | UAAGUUUAGAAAC | 1542 |
| Pr-39 | UUA | | GGCUAG | |

TABLE 37
Sequences of SIRT1-saRNAs (with 3′ overhang)

| | | Sense SEQ | | Anti-sense |
|---|---|---|---|---|
| saRNA ID | Sense (passenger) | ID | Antisense (guide) | SEQ ID |
| SIRT1.NM_001142498- | GACUUAGCUCCCUGAA | 1543 | UAUUUCAGGGAGC | 1544 |
| Pr-1′ | AUAUU | | UAAGUCUU | |
| SIRT1.NM_001142498- | AGACUUAGCUCCCUGA | 1545 | AUUUCAGGGAGCU | 1546 |
| Pr-2′ | AAUUU | | AAGUCUUU | |
| SIRT1.NM_001142498- | GCAAGCUGUGACUAUA | 1547 | UUCUAUAGUCACA | 1548 |
| Pr-13′ | GAAUU | | GCUUGCUU | |
| SIRT1.NM_001142498- | GUGUUAAGUUUGUGUC | 1549 | UGAGACACAAACU | 1550 |
| Pr-18′ | UCAUU | | UAACACUU | |
| SIRT1.NM_001142498- | GCCUUAGCCUUGUCUA | 1551 | AUAUAGACAAGGC | 1552 |
| Pr-19′ | UAUUU | | UAAGGCUU | |
| SIRT1.NM_001142498- | UGCUAGAAGUGUUAAG | 1553 | AAACUUAACACUU | 1554 |
| Pr-23′ | UUUUU | | CUAGCAUU | |
| SIRT1.NM_001142498- | CAGCCACGUUCUUUAA | 1555 | AAUUUAAAGAACG | 1556 |
| Pr-24′ | AUUUU | | UGGCUGUU | |
| SIRT1.NM_001142498- | CUGAAAUACGUUGGAU | 1557 | ACUAUCCAACGUA | 1558 |
| Pr-25′ | AGUUU | | UUUCAGUU | |
| SIRT1.NM_001142498- | AAGUUUGUGUCUCAAU | 1559 | AGUAUUGAGACAC | 1560 |
| Pr-26′ | ACUUU | | AAACUUUU | |
| SIRT1.NM_001142498- | GUUGGAUAGUCGUUCU | 1561 | AACAGAACGACUA | 1562 |
| Pr-34′ | GUUUU | | UCCAACUU | |
| SIRT1.NM_001142498- | AGAGCAAGAUUAGAAU | 1563 | UUUAUUCUAAUCU | 1564 |
| Pr-36′ | AAAUU | | UGCUCUUU | |
| SIRT1.NM_001142498- | UGCAUUACAGAAUGGU | 1565 | AUUACCAUUCUGU | 1566 |
| Pr-37′ | AAUUU | | AAUGCAUU | |
| SIRT1.NM_012238- | GACUUAGCUCCCUGAA | 1567 | UAUUUCAGGGAGC | 1568 |
| Pr-1′ | AUAUU | | UAAGUCUU | |
| SIRT1.NM_012238- | AGACUUAGCUCCCUGA | 1569 | AUUUCAGGGAGCU | 1570 |
| Pr-2′ | AAUUU | | AAGUCUUU | |
| SIRT1.NM_012238- | GCUUCAAACGUGUGUG | 1571 | AUUCACACACGUU | 1572 |
| Pr-6′ | AAUUU | | UGAAGCUU | |
| SIRT1.NM_012238- | GCCUUAGCCUUGUCUA | 1573 | AUAUAGACAAGGC | 1574 |
| Pr-12′ | UAUUU | | UAAGGCUU | |
| SIRT1.NM_012238- | AGCCGUUUCUAAACUU | 1575 | AUUAAGUUUAGAA | 1576 |
| Pr-17′ | AAUUU | | ACGGCUUU | |
| SIRT1.NM_012238- | CUGAAAUACGUUGGAU | 1577 | ACUAUCCAACGUA | 1578 |
| Pr-19′ | AGUUU | | UUUCAGUU | |
| SIRT1.NM_012238- | GUUGGAUAGUCGUUCU | 1579 | AACAGAACGACUA | 1580 |
| Pr-30′ | GUUUU | | UCCAACUU | |
| SIRT1.NM_012238- | UGCCUUAGCCUUGUCU | 1581 | UAUAGACAAGGCU | 1582 |
| Pr-38′ | AUAUU | | AAGGCAUU | |
| SIRT1.NM_012238- | CUAGCCGUUUCUAAAC | 1583 | UAAGUUUAGAAAC | 1584 |
| Pr-39′ | UUAUU | | GGCUAGUU | |

[0444] SIRT1 gene encodes sirtuin 1 (SIRTI) protein, also known as NAD-dependent Deacetylase sirtuin-1, which is an enzyme that deacetylates proteins that contribute to cellular regulation. SIRT1 protein is associated with insulin sensitivity and type 2 diabetes (Sun et al., Cell Metab., vol. 6 (4):307 (2007), the contents of which are incorporated herein by reference in their entirety).

[0445] In one embodiment, provided is a method of modulating SIRT1 protein levels comprising administering SIRTI-saRNA of the present invention, wherein the SIRTI-saRNA targets an antisense RNA transcript of SIRT1 gene. In one embodiment, SIRT1 protein level is increased by at least 20, 30, 40%, or at least 45, 50, 55, 60, 65, 70, 75%, or at least 80% in the presence of the SIRTI-saRNA of the present invention compared to SIRT1 protein level in the absence of the SIRTI-saRNA of the present invention. In a further embodiment, SIRT1 protein level is increased by a factor of at least 2, 3, 4, 5, 6, 7, 8, 9, 10, or by a factor of at least 15, 20, 25, 30, 35, 40, 45, 50, or by a factor of at least 60, 70, 80, 90, 100, in the presence of the SIRTI-saRNA of the present invention compared to SIRT1 protein level in the absence of the SIRTI-saRNA of the present invention.

[0446] In another embodiment, provided is a method of increasing insulin sensitivity and treating type 2 diabetes, comprising administering SIRTI-saRNA of the present invention, wherein the SIRTI-saRNA targets an antisense RNA transcript of SIRT1 gene.

[0447] In one embodiment, the SIRTI-saRNA of the present invention is an antisense sequence such as, but not limited to, SEQ ID NO: 1502, 1504, 1506, 1508, 1510, 1512, 1514, 1516, 1518, 1520, 1522, 1524, 1526, 1528, 1530, 1532, 1534, 1536, 1538, 1540, 1542, 1544, 1546, 1548, 1550, 1552, 1554, 1556, 1558, 1560, 1562, 1564, 1566, 1568, 1570, 1572, 1574, 1576, 1578, 1580, 1582, 1584, 5520, 5522, 5524, 5526, 5528, 5530, 5532, 5534, 5536, 5538, 5540, 5542, 5544, 5546, 5548, 5550, 5552, 5554, 5556, 5558, 5560, 5562, 5564, 5566, 5568, 5570, 5572, 5574, 5576, 5578, 5580, 5582, 5584, 5586, 5588, 5590, 5592, 5594, 5596, 5598, 5600, 5602, 5604, 5606, 5608, 5610, 5612, 5614, 5616, 5618, 5620, 5622, 5624, 5626, 5628, 5630, 5632, 5634, 5636, 5638, 5640, 5642, 5644, 5646, 5648, 5650, 5652, 5654, 5656, 5658, 5660, 5662, 5664, 5666, 5668, 5670, 5672, 5674, 5676, 5678, 5680, 5682, 5684, 5686, 5688, 5690, 5692, 5694, 5696, 5698, 5700, 5702, 5704, 5706, 5708, 5710, 5712, 5714, 5716 and 5718. As a non-limiting example, these SIRTI-saRNA sequences may be used to modulate SIRT1 protein levels, increase insulin sensitivity and treat type 2 diabetes.

[0448] In one embodiment, the SIRTI-saRNA of the present invention is an saRNA duplex. The saRNA duplex may be a pair of sense and antisense sequences such as, but not limited to, SEQ ID NOs: 1501 and 1502; SEQ ID NOs: 1503 and 1504; SEQ ID NOs: 1505 and 1506; SEQ ID NOs: 1507 and 1508; SEQ ID NOs: 1509 and 1510; SEQ ID NOs: 1511 and 1512; SEQ ID NOs: 1513 and 1514; SEQ ID NOs: 1515 and 1516; SEQ ID NOs: 1517 and 1518; SEQ ID NOs: 1519 and 1520; SEQ ID NOs: 1521 and 1522; SEQ ID NOs: 1523 and 1524; SEQ ID NOs: 1525 and 1526; SEQ ID NOs: 1527 and 1528; SEQ ID NOs: 1529 and 1530; SEQ ID NOs: 1531 and 1532; SEQ ID NOs: 1533 and 1534; SEQ ID NOs: 1535 and 1536; SEQ ID NOs: 1537 and 1538; SEQ ID NOs: 1539 and 1540; SEQ ID NOs: 1541 and 1542; SEQ ID NOs: 1543 and 1544; SEQ ID NOs: 1545 and 1546; SEQ ID NOs: 1547 and 1548; SEQ ID NOs: 1549 and 1550; SEQ ID NOs: 1551 and 1552; SEQ ID NOs: 1553 and 1554; SEQ ID NOs: 1555 and 1556; SEQ ID NOs: 1557 and 1558; SEQ ID NOs: 1559 and 1560; SEQ ID NOs: 1561 and 1562; SEQ ID NOs: 1563 and 1564; SEQ ID NOs: 1565 and 1566; SEQ ID NOs: 1567 and 1568; SEQ ID NOs: 1569 and 1570; SEQ ID NOs: 1571 and 1572; SEQ ID NOs: 1573 and 1574; SEQ ID NOs: 1575 and 1576; SEQ ID NOs: 1577 and 1578; SEQ ID NOs: 1579 and 1580; SEQ ID NOs: 1581 and 1582; SEQ ID NOs: 1583 and 1584; SEQ ID NOs: 5519 and 5520; SEQ ID NOs: 5521 and 5522; SEQ ID NOs: 5523 and 5524; SEQ ID NOs: 5525 and 5526; SEQ ID NOs: 5527 and 5528; SEQ ID NOs: 5529 and 5530; SEQ ID NOs: 5531 and 5532; SEQ ID NOs: 5533 and 5534; SEQ ID NOs: 5535 and 5536; SEQ ID NOs: 5537 and 5538; SEQ ID NOs: 5539 and 5540; SEQ ID NOs: 5541 and 5542; SEQ ID NOs: 5543 and 5544; SEQ ID NOs: 5545 and 5546; SEQ ID NOs: 5547 and 5548; SEQ ID NOs: 5549 and 5550; SEQ ID NOs: 5551 and 5552; SEQ ID NOs: 5553 and 5554; SEQ ID NOs: 5555 and 5556; SEQ ID NOs: 5557 and 5558; SEQ ID NOs: 5559 and 5560; SEQ ID NOs: 5561 and 5562; SEQ ID NOs: 5563 and 5564; SEQ ID NOs: 5565 and 5566; SEQ ID NOs: 5567 and 5568; SEQ ID NOs: 5569 and 5570; SEQ ID NOs: 5571 and 5572; SEQ ID NOs: 5573 and 5574; SEQ ID NOs: 5575 and 5576; SEQ ID NOs: 5577 and 5578; SEQ ID NOs: 5579 and 5580; SEQ ID NOs: 5581 and 5582; SEQ ID NOs: 5583 and 5584; SEQ ID NOs: 5585 and 5586; SEQ ID NOs: 5587 and 5588; SEQ ID NOs: 5589 and 5590; SEQ ID NOs: 5591 and 5592; SEQ ID NOs: 5593 and 5594; SEQ ID NOs: 5595 and 5596; SEQ ID NOs: 5597 and 5598; SEQ ID NOs: 5599 and 5600; SEQ ID NOs: 5601 and 5602; SEQ ID NOs: 5603 and 5604; SEQ ID NOs: 5605 and 5606; SEQ ID NOs: 5607 and 5608; SEQ ID NOs: 5609 and 5610; SEQ ID NOs: 5611 and 5612; SEQ ID NOs: 5613 and 5614; SEQ ID NOs: 5615 and 5616; SEQ ID NOs: 5617 and 5618; SEQ ID NOs: 5619 and 5620; SEQ ID NOs: 5621 and 5622; SEQ ID NOs: 5623 and 5624; SEQ ID NOs: 5625 and 5626; SEQ ID NOs: 5627 and 5628; SEQ ID NOs: 5629 and 5630; SEQ ID NOs: 5631 and 5632; SEQ ID NOs: 5633 and 5634; SEQ ID NOs: 5635 and 5636; SEQ ID NOs: 5637 and 5638; SEQ ID NOs: 5639 and 5640; SEQ ID NOs: 5641 and 5642; SEQ ID NOs: 5643 and 5644; SEQ ID NOs: 5645 and 5646; SEQ ID NOs: 5647 and 5648; SEQ ID NOs: 5649 and 5650; SEQ ID NOs: 5651 and 5652; SEQ ID NOs: 5653 and 5654; SEQ ID NOs: 5655 and 5656; SEQ ID NOs: 5657 and 5658; SEQ ID NOs: 5659 and 5660; SEQ ID NOs: 5661 and 5662; SEQ ID NOs: 5663 and 5664; SEQ ID NOs: 5665 and 5666; SEQ ID NOs: 5667 and 5668; SEQ ID NOs: 5669 and 5670; SEQ ID NOs: 5671 and 5672; SEQ ID NOs: 5673 and 5674; SEQ ID NOs: 5675 and 5676; SEQ ID NOs: 5677 and 5678; SEQ ID NOs: 5679 and 5680; SEQ ID NOs: 5681 and 5682; SEQ ID NOs: 5683 and 5684; SEQ ID NOs: 5685 and 5686; SEQ ID NOs: 5687 and 5688; SEQ ID NOs: 5689 and 5690; SEQ ID NOs: 5691 and 5692; SEQ ID NOs: 5693 and 5694; SEQ ID NOs: 5695 and 5696; SEQ ID NOs: 5697 and 5698; SEQ ID NOs: 5699 and 5700; SEQ ID NOs: 5701 and 5702; SEQ ID NOs: 5703 and 5704; SEQ ID NOs: 5705 and 5706; SEQ ID NOs: 5707 and 5708; SEQ ID NOs: 5709 and 5710; SEQ ID NOs: 5711 and 5712; SEQ ID NOs: 5713 and 5714; SEQ ID NOs: 5715 and 5716; SEQ ID NOs: 5717 and 5718. As a non-limiting example, these SIRTI-saRNA sequences which are saRNA duplexes may be used to modulate SIRT1 protein levels, increase insulin sensitivity and treat type 2 diabetes. TH gene

[0449] As another non-limiting example, provided is a method of modulating the expression of TH gene comprising administering saRNA of the present invention, wherein the saRNA targets an antisense RNA transcript of TH gene. These saRNAs are called TH-saRNA. In one embodiment, the expression of TH gene is increased by at least 20, 30, 40%, or at least 45, 50, 55, 60, 65, 70, 75%, or at least 80% in the presence of the TH-saRNA of the present invention compared to the expression of TH gene in the absence of the TH-saRNA of the present invention. In a further embodiment, the expression of TH gene is increased by a factor of at least 2, 3, 4, 5, 6, 7, 8, 9, 10, or by a factor of at least 15, 20, 25, 30, 35, 40, 45, 50, or by a factor of at least 60, 70, 80, 90, 100, in the presence of the TH-saRNA of the present invention compared to the expression of TH gene in the absence of the TH-saRNA of the present invention. The modulation of the expression of TH gene may be reflected or determined by the change of TH mRNA levels.

[0450] TH-saRNAs may be single-stranded and comprise 14-30 nucleotides. The sequence of a single-stranded TH-saRNA may have at least 60%, 70%, 80% or 90% identity with a sequence selected from the sequences of the antisense strands in Table 38-2. In one embodiment, the single-stranded saRNA comprises a sequence selected from the sequences of the antisense strands in Table 38-2. In one embodiment, the single-stranded TH-saRNA may have a 3′ tail. The sequence of a single-stranded TH-saRNA with a 3′ tail may have at least 60%, 70%, 80% or 90% identity with a sequence selected from the sequences of the antisense strands in Table 39. In one embodiment, the single-stranded saRNA comprises a sequence selected from the sequences of the antisense strands in Table 39.

[0451] TH-saRNAs may be double-stranded. The two strands form a duplex and each strand comprises 14-30 nucleotides. The first strand of a double-stranded TH-saRNA may have at least 60%, 70%, 80% or 90% identity with a sequence selected from the sequences of the antisense strands in Table 38-2. In one embodiment, the first strand of the double-stranded saRNA comprises a sequence selected from the sequences of the antisense strands in Table 38-2. The second strand of a double-stranded TH-saRNA may have at least 60%, 70%, 80% or 90% identity with a sequence selected from the sequences of the sense strands in Table 38-2. In one embodiment, the second strand of the double-stranded saRNA comprises a sequence selected from the sequences of the sense strands in Table 38-2. In one embodiment, the double-stranded TH-saRNA may have a 3′ overhang on each strand. The first strand of a double-stranded TH-saRNA may have at least 60%, 70%, 80% or 90% identity with a sequence selected from the sequences of the antisense strands in Table 39. In one embodiment, the first strand of the double-stranded saRNA comprises a sequence selected from the sequences of the antisense strands in Table 39. The second strand of a double-stranded TH-saRNA may have at least 60%, 70%, 80% or 90% identity with a sequence selected from the sequences of the sense strands in Table 39. In one embodiment, the second strand of the double-stranded saRNA comprises a sequence selected from the sequences of the sense strands in Table 39.

[0452] TH-saRNAs may be modified or unmodified.

[0453] Table 38-1 describes the target gene, the targeted sequence, the genomic location of the targeted sequence and the relative location of TH-saRNAs with no 3′ overhang. In Table 38-1, the targeted sequence is defined as a region on the template strand of the target gene which is identical to a region on the target antisense RNA transcript to which the antisense strand of an saRNA hybridizes. In Table 38-1, the relative location is the distance from the 5′ end of the targeted sequence to the TSS. A negative number represents a location upstream of the TSS and a positive number represents a location downstream of the TSS.

TABLE 38-1
Sequences of TH-saRNAs (with no 3′ overhang)

| | Target | Targeted | Targeted | Genomic Location of | Relative |
|---|---|---|---|---|---|
| saRNA ID | Gene | sequence | sequence ID | the Targeted sequence | Location |
| TH.NM_000360- | TH | cattccgatcgttaa | 1605 | chr11: 2192622 plus | 413 |
| Pr-9 | human | gatt | | strand | |
| TH.NM_000360- | TH | ggatggatttgtttcc | 1606 | chr11: 2192605 plus | 430 |
| Pr-14 | human | aca | | strand | |
| TH.NM_000360- | TH | acattccgatcgtta | 1607 | chr11: 2192621 plus | 414 |
| Pr-15 | human | agat | | strand | |
| TH.NM_000360- | TH | tcgttaagattcaag | 1608 | chr11: 2192630 plus | 405 |
| Pr-17 | human | atga | | strand | |
| TH.NM_000360- | TH | cgatcgttaagattc | 1609 | chr11: 2192627 plus | 408 |
| Pr-24 | human | aaga | | strand | |
| TH.NM_000360- | TH | ctgtgtccctgagaa | 1610 | chr11: 2192075 plus | 960 |
| Pr-30 | human | ggta | | strand | |
| TH.NM_000360- | TH | ttccgatcgttaagat | 1611 | chr11: 2192624 plus | 411 |
| Pr-38 | human | tca | | strand | |

TABLE 38-2
Sequences of TH-saRNAs (with no 3′ overhang)

| | | Sense SEQ | | Anti-sense |
|---|---|---|---|---|
| saRNA ID | Sense (passenger) | ID | Antisense (guide) | SEQ ID |
| TH.NM_000360-Pr-9 | CAUUCCGAUCGU | 1612 | AAUCUUAACGAUC | 1613 |
| | UAAGAUU | | GGAAUG | |
| TH.NM_000360-Pr- | GGAUGGAUUUG | 1614 | UGUGGAAACAAAU | 1615 |
| 14 | UUUCCACA | | CCAUCC | |
| TH.NM_000360-Pr- | ACAUUCCGAUCG | 1616 | AUCUUAACGAUCG | 1617 |
| 15 | UUAAGAU | | GAAUGU | |
| TH.NM_000360-Pr- | UCGUUAAGAUUC | 1618 | UCAUCUUGAAUCU | 1619 |
| 17 | AAGAUGA | | UAACGA | |
| TH.NM_000360-Pr- | CGAUCGUUAAGA | 1620 | UCUUGAAUCUUAA | 1621 |
| 24 | UUCAAGA | | CGAUCG | |
| TH.NM_000360-Pr- | CUGUGUCCCUGA | 1622 | UACCUUCUCAGGGA | 1623 |
| 30 | GAAGGUA | | CACAG | |
| TH.NM_000360-Pr- | UUCCGAUCGUUA | 1624 | UGAAUCUUAACGA | 1625 |
| 38 | AGAUUCA | | UCGGAA | |

TABLE 39
Sequences of TH-saRNAs (with 3′ overhang)

| | | Sense | | Anti-sense |
|---|---|---|---|---|
| saRNA ID | Sense (passenger) | SEQ ID | Antisense (guide) | SEQ ID |
| TH.NM_000360-Pr- | CAUUCCGAUCGUUA | 1626 | AAUCUUAACGAUC | 1627 |
| 9′ | AGAUUUU | | GGAAUGUU | |
| TH.NM_000360-Pr- | GGAUGGAUUUGUU | 1628 | UGUGGAAACAAAU | 1629 |
| 14′ | UCCACAUU | | CCAUCCUU | |
| TH.NM_000360-Pr- | ACAUUCCGAUCGUU | 1630 | AUCUUAACGAUCG | 1631 |
| 15′ | AAGAUUU | | GAAUGUUU | |
| TH.NM_000360-Pr- | UCGUUAAGAUUCA | 1632 | UCAUCUUGAAUCU | 1633 |
| 17′ | AGAUGAUU | | UAACGAUU | |
| TH.NM_000360-Pr- | CGAUCGUUAAGAU | 1634 | UCUUGAAUCUUAA | 1635 |
| 24′ | UCAAGAUU | | CGAUCGUU | |
| TH.NM_000360-Pr- | CUGUGUCCCUGAGA | 1636 | UACCUUCUCAGGGA | 1637 |
| 30′ | AGGUAUU | | CACAGUU | |
| TH.NM_000360-Pr- | UUCCGAUCGUUAA | 1638 | UGAAUCUUAACGA | 1639 |
| 38′ | GAUUCAUU | | UCGGAAUU | |

[0454] TH gene encodes the enzyme tyrosine hydroxylase, which is important for normal functioning of the nervous system. Tyrosine hydroxylase takes part in the first step of the pathway that produces a group of hormones called catecholamines. This enzyme assists the conversion of the amino acid tyrosine to a catecholamine called dopamine. Dopamine is a neurotransmitter because it transmits signals between nerve cells in the brain to help control physical movement and emotional behavior. Other catecholamines such as norepinephrine and epinephrine are produced from dopamine. Norepinephrine and epinephrine are involved in the autonomic nervous system, which controls involuntary body processes such as the regulation of blood pressure and body temperature. A deficiency of tyrosine hydroxylase enzyme results in less dopamine, norepinephrine, and epinephrine. These catecholamines are necessary for normal nervous system function, and changes in their levels contribute to the abnormal movements, nervous system dysfunction, and other neurological problems seen in people with TH deficiency. Mutations of TH gene cause dopa-responsive dystonia (Cai et al., PLoS One, vol. 8(6):e65215 (2013), the contents of which are incorporated herein by reference in their entirety). This condition is characterized by a pattern of involuntary muscle contractions (dystonia), tremors, and other uncontrolled movements. A reduction in normal tyrosine hydroxylase enzyme leads to a decrease in the production of dopamine, which causes the movement problems characteristic of dopa-responsive dystonia. Sudden infant death syndrome (SIDS) has also been associated with the expression levels of TH (Holgert et al., Proc Natl Acad Sci. USA, vol. 92 (16):7575 (1995), the contents of which are incorporated herein by reference in their entirety).

[0455] In one embodiment, provided is a method of modulating tyrosine hydroxylase protein levels comprising administering TH-saRNA of the present invention, wherein the TH-saRNA targets an antisense RNA transcript of TH gene. In another embodiment, provided is a method of treating tyrosine hydroxylase deficiency comprising administering TH-saRNA of the present invention, wherein the TH-saRNA targets an antisense RNA transcript of TH gene. In one embodiment, tyrosine hydroxylase protein level is increased by at least 20, 30, 40%, or at least 45, 50, 55, 60, 65, 70, 75%, or at least 80% in the presence of the TH-saRNA of the present invention compared to tyrosine hydroxylase protein level in the absence of the TH-saRNA of the present invention. In a further embodiment, tyrosine hydroxylase protein level is increased by a factor of at least 2, 3, 4, 5, 6, 7, 8, 9, 10, or by a factor of at least 15, 20, 25, 30, 35, 40, 45, 50, or by a factor of at least 60, 70, 80, 90, 100, in the presence of the TH-saRNA of the present invention compared to tyrosine hydroxylase protein level in the absence of the TH-saRNA of the present invention.

[0456] In another embodiment, provided is a method of regulating neurotransmitter levels comprising administering TH-saRNA of the present invention, wherein the TH-saRNA targets an antisense RNA transcript of TH gene. In one embodiment, the neurotransmitter level is increased by at least 20, 30, 40%, or at least 45, 50, 55, 60, 65, 70, 75%, or at least 80% in the presence of the TH-saRNA of the present invention compared to neurotransmitter level in the absence of the TH-saRNA of the present invention. In a further embodiment, tyrosine hydroxylase protein level is increased by a factor of at least 2, 3, 4, 5, 6, 7, 8, 9, 10, or by a factor of at least 15, 20, 25, 30, 35, 40, 45, 50, or by a factor of at least 60, 70, 80, 90, 100, in the presence of the TH-saRNA of the present invention compared to tyrosine hydroxylase protein level in the absence of the TH-saRNA of the present invention. The neurotransmitter may be a catecholamine. Non-limited examples of catecholamine include dopamine, norepinephrine, or epinephrine.

[0457] In another embodiment, provided is a method of treating dopa-responsive dystonia comprising administering TH-saRNA of the present invention, wherein the TH-saRNA targets an antisense RNA transcript of TH gene, and wherein the symptoms of dopa-responsive dystonia are reduced.

[0458] In one embodiment, the TH-saRNA of the present invention is an antisense sequence such as, but not limited to, SEQ ID NO: 1613, 1615, 1617, 1619, 1621, 1623, 1625, 1627, 1629, 1631, 1633, 1635, 1637, 1639, 5720, 5722, 5724, 5726, 5728, 5730, 5732, 5734, 5736, 5738, 5740, 5742, 5744, 5746, 5748, 5750, 5752, 5754, 5756, 5758, 5760, 5762, 5764, 5766, 5768, 5770, 5772, 5774, 5776, 5778, 5780, 5782, 5784, 5786, 5788 and 5790. As a non-limiting example, these TH-saRNA sequences may be used to modulate TH protein levels, increase insulin sensitivity and treat type 2 diabetes.

[0459] In one embodiment, the TH-saRNA of the present invention is an saRNA duplex. The saRNA duplex may be a pair of sense and antisense sequences such as, but not limited to, SEQ ID NOs: 1612 and 1613; SEQ ID NOs: 1614 and 1615; SEQ ID NOs: 1616 and 1617; SEQ ID NOs: 1618 and 1619; SEQ ID NOs: 1620 and 1621; SEQ ID NOs: 1622 and 1623; SEQ ID NOs: 1624 and 1625; SEQ ID NOs: 1626 and 1627; SEQ ID NOs: 1628 and 1629; SEQ ID NOs: 1630 and 1631; SEQ ID NOs: 1632 and 1633; SEQ ID NOs: 1634 and 1635; SEQ ID NOs: 1636 and 1637; SEQ ID NOs: 1638 and 1639; SEQ ID NOs: 5719 and 5720; SEQ ID NOs: 5721 and 5722; SEQ ID NOs: 5723 and 5724; SEQ ID NOs: 5725 and 5726; SEQ ID NOs: 5727 and 5728; SEQ ID NOs: 5729 and 5730; SEQ ID NOs: 5731 and 5732; SEQ ID NOs: 5733 and 5734; SEQ ID NOs: 5735 and 5736; SEQ ID NOs: 5737 and 5738; SEQ ID NOs: 5739 and 5740; SEQ ID NOs: 5741 and 5742; SEQ ID NOs: 5743 and 5744; SEQ ID NOs: 5745 and 5746; SEQ ID NOs: 5747 and 5748; SEQ ID NOs: 5749 and 5750; SEQ ID NOs: 5751 and 5752; SEQ ID NOs: 5753 and 5754; SEQ ID NOs: 5755 and 5756; SEQ ID NOs: 5757 and 5758; SEQ ID NOs: 5759 and 5760; SEQ ID NOs: 5761 and 5762; SEQ ID NOs: 5763 and 5764; SEQ ID NOs: 5765 and 5766; SEQ ID NOs: 5767 and 5768; SEQ ID NOs: 5769 and 5770; SEQ ID NOs: 5771 and 5772; SEQ ID NOs: 5773 and 5774; SEQ ID NOs: 5775 and 5776; SEQ ID NOs: 5777 and 5778; SEQ ID NOs: 5779 and 5780; SEQ ID NOs: 5781 and 5782; SEQ ID NOs: 5783 and 5784; SEQ ID NOs: 5785 and 5786; SEQ ID NOs: 5787 and 5788; SEQ ID NOs: 5789 and 5790. As a non-limiting example, these TH-saRNA sequences which are saRNA duplexes may be used to modulate TH protein levels, increase insulin sensitivity and treat type 2 diabetes.

### EPO Gene

[0460] As another non-limiting example, provided is a method of modulating the expression of EPO gene comprising administering saRNA of the present invention, wherein the saRNA targets an antisense RNA transcript of EPO gene. These saRNAs are called EPO-saRNA. In one embodiment, the expression of EPO gene is increased by at least 20, 30, 40%, or at least 45, 50, 55, 60, 65, 70, 75%, or at least 80% in the presence of the EPO-saRNA of the present invention compared to the expression of EPO gene in the absence of the EPO-saRNA of the present invention. In a further embodiment, the expression of EPO gene is increased by a factor of at least 2, 3, 4, 5, 6, 7, 8, 9, 10, or by a factor of at least 15, 20, 25, 30, 35, 40, 45, 50, or by a factor of at least 60, 70, 80, 90, 100, in the presence of the EPO-saRNA of the present invention compared to the expression of EPO gene in the absence of the EPO-saRNA of the present invention. The modulation of the expression of EPO gene may be reflected or determined by the change of EPO mRNA levels.

[0461] EPO-saRNAs may be single-stranded and comprise 14-30 nucleotides. The sequence of a single-stranded EPO-saRNA may have at least 60%, 70%, 80% or 90% identity with a sequence selected from the sequences of the antisense strands in Table 40-2. In one embodiment, the single-stranded saRNA comprises a sequence selected from the sequences of the antisense strands in Table 40-2. In one embodiment, the single-stranded EPO-saRNA may have a 3′ tail. The sequence of a single-stranded EPO-saRNA with a 3′ tail may have at least 60%, 70%, 80% or 90% identity with a sequence selected from the sequences of the antisense strands in Table 41. In one embodiment, the single-stranded saRNA comprises a sequence selected from the sequences of the antisense strands in Table 41.

[0462] EPO-saRNAs may be double-stranded. The two strands form a duplex and each strand comprises 14-30 nucleotides. The first strand of a double-stranded EPO-saRNA may have at least 60%, 70%, 80% or 90% identity with a sequence selected from the sequences of the antisense strands in Table 40-2. In one embodiment, the first strand of the double-stranded saRNA comprises a sequence selected from the sequences of the antisense strands in Table 40-2. The second strand of a double-stranded EPO-saRNA may have at least 60%, 70%, 80% or 90% identity with a sequence selected from the sequences of the sense strands in Table 40-2. In one embodiment, the second strand of the double-stranded saRNA comprises a sequence selected from the sequences of the sense strands in Table 40-2. In one embodiment, the double-stranded EPO-saRNA may have a 3′ overhang on each strand. The first strand of a double-stranded EPO-saRNA may have at least 60%, 70%, 80% or 90% identity with a sequence selected from the sequences of the antisense strands in Table 41. In one embodiment, the first strand of the double-stranded saRNA comprises a sequence selected from the sequences of the antisense strands in Table 41. The second strand of a double-stranded EPO-saRNA may have at least 60%, 70%, 80% or 90% identity with a sequence selected from the sequences of the sense strands in Table 41. In one embodiment, the second strand of the double-stranded saRNA comprises a sequence selected from the sequences of the sense strands in Table 41.

[0463] EPO-saRNAs may be modified or unmodified.

[0464] Table 40-1 describes the target gene, the targeted sequence, the genomic location of the targeted sequence and the relative location of EPO-saRNAs with no 3′ overhang. In Table 40-1, the targeted sequence is defined as a region on the template strand of the target gene which is identical to a region on the target antisense RNA transcript to which the antisense strand of an saRNA hybridizes. In Table 40-1, the relative location is the distance from the 5′ end of the targeted sequence to the TSS. A negative number represents a location upstream of the TSS and a positive number represents a location downstream of the TSS.

TABLE 40-1
Sequences of EPO-saRNAs (with no 3′ overhang)

| | | | Targeted | Genomic Location of | |
|---|---|---|---|---|---|
| | | Targeted | sequence | the Targeted | Relative |
| saRNA ID | Target Gene | sequence | ID | sequence | Location |
| EPO.NM_000799- | EPO human | ggacatgttctagaaa | 1640 | chr7: 100317919 | −484 |
| Pr-2 | | caa | | minus strand | |
| EPO.NM_000799- | EPO human | gcgtgagttctgtgga | 1641 | chr7: 100319346 | 943 |
| Pr-6 | | atg | | minus strand | |
| EPO.NM_000799- | EPO human | gagcgtgctatctgg | 1642 | chr7: 100318092 | −311 |
| Pr-9 | | gaaa | | minus strand | |
| EPO.NM_000799- | EPO human | cgtgagttctgtggaa | 1643 | chr7: 100319345 | 942 |
| Pr-14 | | tgt | | minus strand | |
| EPO.NM_000799- | EPO human | tgaccatgttgaggaa | 1644 | chr7: 100317897 | −506 |
| Pr-25 | | ttt | | minus strand | |
| EPO.NM_000799- | EPO human | gggtctcaccgtgata | 1645 | chr7: 100319316 | 913 |
| Pr-27 | | ttc | | minus strand | |
| EPO.NM_000799- | EPO human | ggctgttatctgcatgt | 1646 | chr7: 100318327 | −76 |
| Pr-33 | | gt | | minus strand | |
| EPO.NM_000799- | EPO human | ttgctgagttccgcaa | 1647 | chr7: 100318005 | −398 |
| Pr-39 | | agt | | minus strand | |

TABLE 40-2
Sequences of EPO-saRNAs (with no 3′ overhang)

| | | | | Anti- |
|---|---|---|---|---|
| | | Sense SEQ | | sense |
| saRNA ID | Sense (passenger) | ID | Antisense (guide) | SEQ ID |
| EPO.NM_000799-Pr-2 | GGACAUGUUCUAG | 1648 | UUGUUUCUAGAAC | 1649 |
| | AAACAA | | AUGUCC | |
| EPO.NM_000799-Pr-6 | GCGUGAGUUCUGU | 1650 | CAUUCCACAGAAC | 1651 |
| | GGAAUG | | UCACGC | |
| EPO.NM_000799-Pr-9 | GAGCGUGCUAUCU | 1652 | UUUCCCAGAUAGC | 1653 |
| | GGGAAA | | ACGCUC | |
| EPO.NM_000799-Pr-14 | CGUGAGUUCUGUG | 1654 | ACAUUCCACAGAA | 1655 |
| | GAAUGU | | CUCACG | |
| EPO.NM_000799-Pr-25 | UGACCAUGUUGAG | 1656 | AAAUUCCUCAACA | 1657 |
| | GAAUUU | | UGGUCA | |
| EPO.NM_000799-Pr-27 | GGGUCUCACCGUG | 1658 | GAAUAUCACGGUG | 1659 |
| | AUAUUC | | AGACCC | |
| EPO.NM_000799-Pr-33 | GGCUGUUAUCUGC | 1660 | ACACAUGCAGAUA | 1661 |
| | AUGUGU | | ACAGCC | |
| EPO.NM_000799-Pr-39 | UUGCUGAGUUCCG | 1662 | ACUUUGCGGAACU | 1663 |
| | CAAAGU | | CAGCAA | |

TABLE 41
Sequences of EPO-saRNAs (with 3′ overhang)

| | | Sense | | Antisense |
|---|---|---|---|---|
| saRNA ID | Sense (passenger) | SEQ ID | Antisense (guide) | SEQ ID |
| EPO.NM_000799- | GGACAUGUUCUAGAAACA | 1664 | UUGUUUCUAGAACA | 1665 |
| Pr-2′ | AUU | | UGUCCUU | |
| EPO.NM_000799- | GCGUGAGUUCUGUGGAA | 1666 | CAUUCCACAGAACU | 1667 |
| Pr-6′ | UGUU | | CACGCUU | |
| EPO.NM_000799- | GAGCGUGCUAUCUGGGAA | 1668 | UUUCCCAGAUAGCA | 1669 |
| Pr-9′ | AUU | | CGCUCUU | |
| EPO.NM_000799- | CGUGAGUUCUGUGGAAU | 1670 | ACAUUCCACAGAAC | 1671 |
| Pr-14′ | GUUU | | UCACGUU | |
| EPO.NM_000799- | UGACCAUGUUGAGGAAU | 1672 | AAAUUCCUCAACAU | 1673 |
| Pr-25′ | UUUU | | GGUCAUU | |
| EPO.NM_000799- | GGGUCUCACCGUGAUAUU | 1674 | GAAUAUCACGGUGA | 1675 |
| Pr-27′ | CUU | | GACCCUU | |
| EPO.NM_000799- | GGCUGUUAUCUGCAUGUG | 1676 | ACACAUGCAGAUAA | 1677 |
| Pr-33′ | UUU | | CAGCCUU | |
| EPO.NM_000799- | UUGCUGAGUUCCGCAAAG | 1678 | ACUUUGCGGAACUC | 1679 |
| Pr-39′ | UUU | | AGCAAUU | |

[0465] EPO gene encodes erythropoietin protein, a secreted, glycosylated cytokine composed of four alpha helical bundles. Erythropoietin protein is found in the plasma and regulates red cell production by promoting erythroid differentiation and initiating hemoglobin synthesis. It is the principal hormone involved in the maintenance of a physiological level of circulating erythrocyte mass. It also has neuroprotective activity against a variety of potential brain injuries and antiapoptotic functions in several tissue types. Mutations of EPO gene are associated with microvascular complications of diabetes 2 (MVCD2) including diabetic retinopathy, diabetic nephropathy leading to end-stage renal disease, and diabetic neuropathy (Tong et al., PNAS, vol. 105:6998 (2008), the contents of which are incorporated herein by reference in their entirety).

[0466] In one embodiment, provided is a method of modulating erythropoietin protein levels comprising administering EPO-saRNA of the present invention, wherein the EPO-saRNA targets an antisense RNA transcript of EPO gene. In one embodiment, erythropoietin protein level is increased by at least 20, 30, 40%, or at least 45, 50, 55, 60, 65, 70, 75%, or at least 80% in the presence of the EPO-saRNA of the present invention compared to erythropoietin protein level in the absence of the EPO-saRNA of the present invention. In a further embodiment, erythropoietin protein level is increased by a factor of at least 2, 3, 4, 5, 6, 7, 8, 9, 10, or by a factor of at least 15, 20, 25, 30, 35, 40, 45, 50, or by a factor of at least 60, 70, 80, 90, 100, in the presence of the EPO-saRNA of the present invention compared to erythropoietin protein level in the absence of the EPO-saRNA of the present invention.

[0467] In another embodiment, provided is a method of preventing or treating MVCD2 comprising administering EPO-saRNA of the present invention, wherein the EPO-saRNA targets an antisense RNA transcript of EPO gene, wherein the patient's susceptibility of MVCD2 is reduced or the symptoms of MVCD2 are reduced.

[0468] In one embodiment, the EPO-saRNA of the present invention is an antisense sequence such as, but not limited to, SEQ ID NO: 1649, 1651, 1653, 1655, 1657, 1659, 1661, 1663, 1665, 1667, 1669, 1671, 1673, 1675, 1677, 1679, 3140, 3142, 3144, 3146, 3148, 3150, 3152, 3154, 3156, 3158, 3160, 3162, 3164, 3166, 3168, 3170, 3172, 3174, 3176, 3178, 3180, 3182, 3184, 3186, 3188, 3190, 3192, 3194, 3196, 3198, 3200, 3202, 3204, 3206, 3208, 3210, 3212, 3214 and 3216. As a non-limiting example, these EPO-saRNA sequences may be used to modulate EPO protein levels, preventing or treating MVCD2.

[0469] In one embodiment, the EPO-saRNA of the present invention is an saRNA duplex. The saRNA duplex may be a pair of sense and antisense sequences such as, but not limited to, SEQ ID NOs: 1648 and 1649; SEQ ID NOs: 1650 and 1651; SEQ ID NOs: 1652 and 1653; SEQ ID NOs: 1654 and 1655; SEQ ID NOs: 1656 and 1657; SEQ ID NOs: 1658 and 1659; SEQ ID NOs: 1660 and 1661; SEQ ID NOs: 1662 and 1663; SEQ ID NOs: 1664 and 1665; SEQ ID NOs: 1666 and 1667; SEQ ID NOs: 1668 and 1669; SEQ ID NOs: 1670 and 1671; SEQ ID NOs: 1672 and 1673; SEQ ID NOs: 1674 and 1675; SEQ ID NOs: 1676 and 1677; SEQ ID NOs: 1678 and 1679; SEQ ID NOs: 3139 and 3140; SEQ ID NOs: 3141 and 3142; SEQ ID NOs: 3143 and 3144; SEQ ID NOs: 3145 and 3146; SEQ ID NOs: 3147 and 3148; SEQ ID NOs: 3149 and 3150; SEQ ID NOs: 3151 and 3152; SEQ ID NOs: 3153 and 3154; SEQ ID NOs: 3155 and 3156; SEQ ID NOs: 3157 and 3158; SEQ ID NOs: 3159 and 3160; SEQ ID NOs: 3161 and 3162; SEQ ID NOs: 3163 and 3164; SEQ ID NOs: 3165 and 3166; SEQ ID NOs: 3167 and 3168; SEQ ID NOs: 3169 and 3170; SEQ ID NOs: 3171 and 3172; SEQ ID NOs: 3173 and 3174; SEQ ID NOs: 3175 and 3176; SEQ ID NOs: 3177 and 3178; SEQ ID NOs: 3179 and 3180; SEQ ID NOs: 3181 and 3182; SEQ ID NOs: 3183 and 3184; SEQ ID NOs: 3185 and 3186; SEQ ID NOs: 3187 and 3188; SEQ ID NOs: 3189 and 3190; SEQ ID NOs: 3191 and 3192; SEQ ID NOs: 3193 and 3194; SEQ ID NOs: 3195 and 3196; SEQ ID NOs: 3197 and 3198; SEQ ID NOs: 3199 and 3200; SEQ ID NOs: 3201 and 3202; SEQ ID NOs: 3203 and 3204; SEQ ID NOs: 3205 and 3206; SEQ ID NOs: 3207 and 3208; SEQ ID NOs: 3209 and 3210; SEQ ID NOs: 3211 and 3212; SEQ ID NOs: 3213 and 3214; SEQ ID NOs: 3215 and 3216. As a non-limiting example, these EPO-saRNA sequences which are saRNA duplexes may be used to modulate EPO protein levels, preventing or treating MVCD2. CDKNIB gene

[0470] As another non-limiting example, provided is a method of modulating the expression of CDKNIB gene comprising administering saRNA of the present invention, wherein the saRNA targets an antisense RNA transcript of CDKNIB gene. These saRNAs are called CDKNIB-saRNA. In one embodiment, the expression of CDKNIB gene is increased by at least 20, 30, 40%, or at least 45, 50, 55, 60, 65, 70, 75%, or at least 80% in the presence of the CDKNIB-saRNA of the present invention compared to the expression of CDKNIB gene in the absence of the CDKNIB-saRNA of the present invention. In a further embodiment, the expression of CDKNIB gene is increased by a factor of at least 2, 3, 4, 5, 6, 7, 8, 9, 10, or by a factor of at least 15, 20, 25, 30, 35, 40, 45, 50, or by a factor of at least 60, 70, 80, 90, 100, in the presence of the CDKNIB-saRNA of the present invention compared to the expression of CDKNIB gene in the absence of the CDKNIB-saRNA of the present invention. The modulation of the expression of CDKN1B gene may be reflected or determined by the change of CDKNIB mRNA levels.

[0471] CDKN1B-saRNAs may be single-stranded and comprise 14-30 nucleotides. The sequence of a single-stranded CDKNIB-saRNA may have at least 60%, 70%, 80% or 90% identity with a sequence selected from the sequences of the antisense strands in Table 42-2. In one embodiment, the single-stranded saRNA comprises a sequence selected from the sequences of the antisense strands in Table 42-2. In one embodiment, the single-stranded CDKNIB-saRNA may have a 3′ tail. The sequence of a single-stranded CDKNIB-saRNA with a 3′ tail may have at least 60%, 70%, 80% or 90% identity with a sequence selected from the sequences of the antisense strands in Table 43. In one embodiment, the single-stranded saRNA comprises a sequence selected from the sequences of the antisense strands in Table 43.

[0472] CDKN1B-saRNAs may be double-stranded. The two strands form a duplex and each strand comprises 14-30 nucleotides. The first strand of a double-stranded CDKNIB-saRNA may have at least 60%, 70%, 80% or 90% identity with a sequence selected from the sequences of the antisense strands in Table 42-2. In one embodiment, the first strand of the double-stranded saRNA comprises a sequence selected from the sequences of the antisense strands in Table 42-2. The second strand of a double-stranded CDKNIB-saRNA may have at least 60%, 70%, 80% or 90% identity with a sequence selected from the sequences of the sense strands in Table 42-2. In one embodiment, the second strand of the double-stranded saRNA comprises a sequence selected from the sequences of the sense strands in Table 42-2. In one embodiment, the double-stranded CDKNIB-saRNA may have a 3′ overhang on each strand. The first strand of a double-stranded CDKNIB-saRNA may have at least 60%, 70%, 80% or 90% identity with a sequence selected from the sequences of the antisense strands in Table 43. In one embodiment, the first strand of the double-stranded saRNA comprises a sequence selected from the sequences of the antisense strands in Table 43. The second strand of a double-stranded CDKNIB-saRNA may have at least 60%, 70%, 80% or 90% identity with a sequence selected from the sequences of the sense strands in Table 43. In one embodiment, the second strand of the double-stranded saRNA comprises a sequence selected from the sequences of the sense strands in Table 43.

[0473] CDKN1B-saRNAs may be modified or unmodified.

[0474] Table 42-1 describes the target gene, the targeted sequence, the genomic location of the targeted sequence and the relative location of CDKN1B-saRNAs with no 3′ overhang. In Table 42-1, the targeted sequence is defined as a region on the template strand of the target gene which is identical to a region on the target antisense RNA transcript to which the antisense strand of an saRNA hybridizes. In Table 42-1, the relative location is the distance from the 5′ end of the targeted sequence to the TSS. A negative number represents a location upstream of the TSS and a positive number represents a location downstream of the TSS.

TABLE 42-1
Sequences of CDKN1B-saRNAs (with no 3′ overhang)

| | Target | Targeted | Targeted | Genomic Location of the | Relative |
|---|---|---|---|---|---|
| saRNA ID | Gene | sequence | sequence ID | Targeted sequence | Location |
| CDKN1B.NM_004064- | CDKN1B | atgcgtgtcctcagagt | 1680 | chr12: 12871141 minus | 957 |
| Pr-1 | human | ta | | strand | |
| CDKN1B.NM_004064- | CDKN1B | ggctggcctcggagaa | 1681 | chr12: 12870060 minus | −124 |
| Pr-2 | human | att | | strand | |
| CDKN1B.NM_004064- | CDKN1B | gctagtgaatgctttca | 1682 | chr12: 12869231 minus | −953 |
| Pr-3 | human | ga | | strand | |
| CDKN1B.NM_004064- | CDKN1B | cggcgagtctatttaaa | 1683 | chr12: 12870269 minus | 85 |
| Pr-4 | human | ca | | strand | |
| CDKN1B.NM_004064- | CDKN1B | gaaaggaactcaagat | 1684 | chr12: 12869557 minus | −627 |
| Pr-5 | human | taa | | strand | |
| CDKN1B.NM_004064- | CDKN1B | cgagtctccgctgatca | 1685 | chr12: 12870554 minus | 370 |
| Pr-13 | human | aa | | strand | |
| CDKN1B.NM_004064- | CDKN1B | gctggcctcggagaaa | 1686 | chr12: 12870059 minus | −125 |
| Pr-14 | human | tta | | strand | |
| CDKN1B.NM_004064- | CDKN1B | gcgagtctatttaaaca | 1687 | chr12: 12870267 minus | 83 |
| Pr-19 | human | ga | | strand | |
| CDKN1B.NM_004064 | CDKN1B | acaatattcagatgcta | 1688 | chr12: 12869244 minus | −940 |
| Pr-21 | human | gt | | strand | |
| CDKN1B.NM_004064- | CDKN1B | ccgagtctccgctgatc | 1689 | chr12: 12870555 minus | 371 |
| Pr-22 | human | aa | | strand | |
| CDKN1B.NM_004064- | CDKN1B | tggcctcggagaaatta | 1690 | chr12: 12870057 minus | −127 |
| Pr-24 | human | aa | | strand | |

TABLE 42-2
Sequences of CDKN1B-saRNAs (with no 3′ overhang)

| | | Sense SEQ | | Anti-sense SEQ |
|---|---|---|---|---|
| saRNA ID | Sense (passenger) | ID | Antisense (guide) | ID |
| CDKN1B.NM_004064- | AUGCGUGUCCUCAG | 1691 | UAACUCUGAGGACAC | 1692 |
| Pr-1 | AGUUA | | GCAU | |
| CDKN1B.NM_004064- | GGCUGGCCUCGGAG | 1693 | AAUUUCUCCGAGGCC | 1694 |
| Pr-2 | AAAUU | | AGCC | |
| CDKN1B.NM_004064- | GCUAGUGAAUGCUU | 1695 | UCUGAAAGCAUUCAC | 1696 |
| Pr-3 | UCAGA | | UAGC | |
| CDKN1B.NM_004064- | CGGCGAGUCUAUUU | 1697 | UGUUUAAAUAGACUC | 1698 |
| Pr-4 | AAACA | | GCCG | |
| CDKN1B.NM_004064- | GAAAGGAACUCAAG | 1699 | UUAAUCUUGAGUUCC | 1700 |
| Pr-5 | AUUAA | | UUUC | |
| CDKN1B.NM_004064- | CGAGUCUCCGCUGA | 1701 | UUUGAUCAGCGGAGA | 1702 |
| Pr- | UCAAA | | CUCG | |
| 13 | | | | |
| CDKN1B.NM_004064- | GCUGGCCUCGGAGA | 1703 | UAAUUUCUCCGAGGC | 1704 |
| Pr- | AAUUA | | CAGC | |
| 14 | | | | |
| CDKN1B.NM_004064- | GCGAGUCUAUUUAA | 1705 | UCUGUUUAAAUAGAC | 1706 |
| Pr- | ACAGA | | UCGC | |
| 19 | | | | |
| CDKN1B.NM_004064- | ACAAUAUUCAGAUG | 1707 | ACUAGCAUCUGAAUA | 1708 |
| Pr- | CUAGU | | UUGU | |
| 21 | | | | |
| CDKN1B.NM_004064- | CCGAGUCUCCGCUG | 1709 | UUGAUCAGCGGAGAC | 1710 |
| Pr- | AUCAA | | UCGG | |
| 22 | | | | |
| CDKN1B.NM_004064- | UGGCCUCGGAGAAA | 1711 | UUUAAUUUCUCCGAG | 1712 |
| Pr- | UUAAA | | GCCA | |
| 24 | | | | |

TABLE 43
Sequences of CDKN1B-saRNAs (with 3′ overhang)

| | | Sense | | Antisense |
|---|---|---|---|---|
| saRNA ID | Sense (passenger) | SEQ ID | Antisense (guide) | SEQ ID |
| CDKN1B.NM_004064- | AUGCGUGUCCUCAGAGU | 1713 | UAACUCUGAGGACACG | 1714 |
| Pr-1′ | UAUU | | CAUUU | |
| CDKN1B.NM_004064- | GGCUGGCCUCGGAGAAA | 1715 | AAUUUCUCCGAGGCCA | 1716 |
| Pr-2′ | UUUU | | GCCUU | |
| CDKN1B.NM_004064- | GCUAGUGAAUGCUUUC | 1717 | UCUGAAAGCAUUCACU | 1718 |
| Pr-3′ | AGAUU | | AGCUU | |
| CDKN1B.NM_004064- | CGGCGAGUCUAUUUAA | 1719 | UGUUUAAAUAGACUC | 1720 |
| Pr-4′ | ACAUU | | GCCGUU | |
| CDKN1B.NM_004064- | GAAAGGAACUCAAGAU | 1721 | UUAAUCUUGAGUUCCU | 1722 |
| Pr-5′ | UAAUU | | UUCUU | |
| CDKN1B.NM_004064- | CGAGUCUCCGCUGAUCA | 1723 | UUUGAUCAGCGGAGAC | 1724 |
| Pr-13′ | AAUU | | UCGUU | |
| CDKN1B.NM_004064- | GCUGGCCUCGGAGAAAU | 1725 | UAAUUUCUCCGAGGCC | 1726 |
| Pr-14′ | UAUU | | AGCUU | |
| CDKN1B.NM_004064- | GCGAGUCUAUUUAAAC | 1727 | UCUGUUUAAAUAGAC | 1728 |
| Pr-19′ | AGAUU | | UCGCUU | |
| CDKN1B.NM_004064- | ACAAUAUUCAGAUGCU | 1729 | ACUAGCAUCUGAAUAU | 1730 |
| Pr-21′ | AGUUU | | UGUUU | |
| CDKN1B.NM_004064- | CCGAGUCUCCGCUGAUC | 1731 | UUGAUCAGCGGAGACU | 1732 |
| Pr-22′ | AAUU | | CGGUU | |
| CDKN1B.NM_004064- | UGGCCUCGGAGAAAUU | 1733 | UUUAAUUUCUCCGAGG | 1734 |
| Pr-24′ | AAAUU | | CCAUU | |

[0475] CDKN1B gene encodes p27 (Kip1) protein, which plays an important role in controlling cell growth and division. p27 protein prevents cells from dividing too quickly or at the wrong time by blocking cell cycle progression. It is also involved in controlling cell differentiation. p27 protein may be used as a tumor suppressor. Mutations of CDKNIB cause multiple endocrine neoplasia type 4 (MEN4) and tumors in single endocrine glands. Lack of p27 protein causes cells to divide abnormally and form a tumor (Occhi et al., Eur J Endocrinol, 163(3):369 (2010), the contents of which are incorporated herein by reference in their entirety). These tumors may be cancerous or non-cancerous. The most common endocrine glands affected in multiple endocrine neoplasia type 4 are the parathyroid glands and the pituitary gland, although additional endocrine glands and other organs can also be involved. Tumors in single endocrine glands that are related to CDKNIB include tumors in pituitary gland or the parathyroid glands.

[0476] In one embodiment, provided is a method of modulating p27 protein levels comprising administering CDKNIB-saRNA of the present invention, wherein the CDKNIB-saRNA targets an antisense RNA transcript ofCDKNIB gene. In one embodiment, p27 protein level is increased by at least 20, 30, 40%, or at least 45, 50, 55, 60, 65, 70, 75%, or at least 80% in the presence of the CDKNIB-saRNA of the present invention compared to p27 protein level in the absence of the CDKNIB-saRNA of the present invention. In a further embodiment, p27 protein level is increased by a factor of at least 2, 3, 4, 5, 6, 7, 8, 9, 10, or by a factor of at least 15, 20, 25, 30, 35, 40, 45, 50, or by a factor of at least 60, 70, 80, 90, 100, in the presence of the CDKNIB-saRNA of the present invention compared to p27 protein level in the absence of the CDKNIB-saRNA of the present invention.

[0477] In another embodiment, provided is a method of treating multiple endocrine neoplasia type 4 comprising administering CDKNIB-saRNA of the present invention, wherein the CDKNIB-saRNA targets an antisense RNA transcript of CDKNIB gene. The multiple endocrine neoplasia type 4 may be in parathyroid glands and the pituitary gland. In another embodiment, provided is a method of treating tumors in a single endocrine gland comprising administering CDKNIB-saRNA of the present invention, wherein the CDKNIB-saRNA targets an antisense RNA transcript of CDKNIB gene. The single endocrine gland may be pituitary gland or the parathyroid glands.

[0478] In one embodiment, the CDKNIB-saRNA of the present invention is an antisense sequence such as, but not limited to, SEQ ID NO: 1692, 1694, 1696, 1698, 1700, 1702, 1704, 1706, 1708, 1710, 1712, 1714, 1716, 1718, 1720, 1722, 1724, 1726, 1728, 1730, 1732, 1734, 2262, 2264, 2266, 2268, 2270, 2272, 2274, 2276, 2278, 2280, 2282, 2284, 2286, 2288, 2290, 2292, 2294, 2296, 2298, 2300, 2302, 2304, 2306, 2308, 2310, 2312, 2314, 2316, 2318, 2320, 2322, 2324, 2326, 2328, 2330, 2332, 2334, 2336, 2338, 2340, 2342, 2344, 2346, 2348, 2350, 2352, 2354, 2356, 2358 and 2360. As a non-limiting example, these CDKNIB-saRNA sequences may be used to modulate CDKNIB protein levels, p27 protein levels, and/or treating multiple endocrine neoplasia type 4 and tumors in a single endocrine gland.

[0479] In one embodiment, the CDKNIB-saRNA of the present invention is an saRNA duplex. The saRNA duplex may be a pair of sense and antisense sequences such as, but not limited to, SEQ ID NOs: 1691 and 1692; SEQ ID NOs: 1693 and 1694; SEQ ID NOs: 1695 and 1696; SEQ ID NOs: 1697 and 1698; SEQ ID NOs: 1699 and 1700; SEQ ID NOs: 1701 and 1702; SEQ ID NOs: 1703 and 1704; SEQ ID NOs: 1705 and 1706; SEQ ID NOs: 1707 and 1708; SEQ ID NOs: 1709 and 1710; SEQ ID NOs: 1711 and 1712; SEQ ID NOs: 1713 and 1714; SEQ ID NOs: 1715 and 1716; SEQ ID NOs: 1717 and 1718; SEQ ID NOs: 1719 and 1720; SEQ ID NOs: 1721 and 1722; SEQ ID NOs: 1723 and 1724; SEQ ID NOs: 1725 and 1726; SEQ ID NOs: 1727 and 1728; SEQ ID NOs: 1729 and 1730; SEQ ID NOs: 1731 and 1732; SEQ ID NOs: 1733 and 1734; SEQ ID NOs: 2261 and 2262; SEQ ID NOs: 2263 and 2264; SEQ ID NOs: 2265 and 2266; SEQ ID NOs: 2267 and 2268; SEQ ID NOs: 2269 and 2270; SEQ ID NOs: 2271 and 2272; SEQ ID NOs: 2273 and 2274; SEQ ID NOs: 2275 and 2276; SEQ ID NOs: 2277 and 2278; SEQ ID NOs: 2279 and 2280; SEQ ID NOs: 2281 and 2282; SEQ ID NOs: 2283 and 2284; SEQ ID NOs: 2285 and 2286; SEQ ID NOs: 2287 and 2288; SEQ ID NOs: 2289 and 2290; SEQ ID NOs: 2291 and 2292; SEQ ID NOs: 2293 and 2294; SEQ ID NOs: 2295 and 2296; SEQ ID NOs: 2297 and 2298; SEQ ID NOs: 2299 and 2300; SEQ ID NOs: 2301 and 2302; SEQ ID NOs: 2303 and 2304; SEQ ID NOs: 2305 and 2306; SEQ ID NOs: 2307 and 2308; SEQ ID NOs: 2309 and 2310; SEQ ID NOs: 2311 and 2312; SEQ ID NOs: 2313 and 2314; SEQ ID NOs: 2315 and 2316; SEQ ID NOs: 2317 and 2318; SEQ ID NOs: 2319 and 2320; SEQ ID NOs: 2321 and 2322; SEQ ID NOs: 2323 and 2324; SEQ ID NOs: 2325 and 2326; SEQ ID NOs: 2327 and 2328; SEQ ID NOs: 2329 and 2330; SEQ ID NOs: 2331 and 2332; SEQ ID NOs: 2333 and 2334; SEQ ID NOs: 2335 and 2336; SEQ ID NOs: 2337 and 2338; SEQ ID NOs: 2339 and 2340; SEQ ID NOs: 2341 and 2342; SEQ ID NOs: 2343 and 2344; SEQ ID NOs: 2345 and 2346; SEQ ID NOs: 2347 and 2348; SEQ ID NOs: 2349 and 2350; SEQ ID NOs: 2351 and 2352; SEQ ID NOs: 2353 and 2354; SEQ ID NOs: 2355 and 2356; SEQ ID NOs: 2357 and 2358; SEQ ID NOs: 2359 and 2360. As a non-limiting example, these CDKNIB-saRNA sequences which are saRNA duplexes may be used to modulate CDKNIB protein levels, p27 protein levels, and/or treating multiple endocrine neoplasia type 4 and tumors in a single endocrine gland.

### MDM2 Gene

[0480] As another non-limiting example, provided is a method of modulating the expression of MDM2 gene comprising administering saRNA of the present invention, wherein the saRNA targets an antisense RNA transcript of MDM2 gene. These saRNAs are called MDM2-saRNA. In one embodiment, the expression of MDM2 gene is increased by at least 20, 30, 40%, or at least 45, 50, 55, 60, 65, 70, 75%, or at least 80% in the presence of the MDM2-saRNA of the present invention compared to the expression of MDM2 gene in the absence of the MDM2-saRNA of the present invention. In a further embodiment, the expression of MDM2 gene is increased by a factor of at least 2, 3, 4, 5, 6, 7, 8, 9, 10, or by a factor of at least 15, 20, 25, 30, 35, 40, 45, 50, or by a factor of at least 60, 70, 80, 90, 100, in the presence of the MDM2-saRNA of the present invention compared to the expression of MDM2 gene in the absence of the MDM2-saRNA of the present invention. The modulation of the expression of MDM2 gene may be reflected or determined by the change of MDM2 mRNA levels.

[0481] MDM2-saRNAs may be single-stranded and comprise 14-30 nucleotides. The sequence of a single-stranded MDM2-saRNA may have at least 60%, 70%, 80% or 90% identity with a sequence selected from the sequences of the antisense strands in Table 44-2. In one embodiment, the single-stranded saRNA comprises a sequence selected from the sequences of the antisense strands in Table 44-2. In one embodiment, the single-stranded MDM2-saRNA may have a 3′ tail. The sequence of a single-stranded MDM2-saRNA with a 3′ tail may have at least 60%, 70%, 80% or 90% identity with a sequence selected from the sequences of the antisense strands in Table 45. In one embodiment, the single-stranded saRNA comprises a sequence selected from the sequences of the antisense strands in Table 45.

[0482] MDM2-saRNAs may be double-stranded. The two strands form a duplex and each strand comprises 14-30 nucleotides. The first strand of a double-stranded MDM2-saRNA may have at least 60%, 70%, 80% or 90% identity with a sequence selected from the sequences of the antisense strands in Table 44-2. In one embodiment, the first strand of the double-stranded saRNA comprises a sequence selected from the sequences of the antisense strands in Table 44-2. The second strand of a double-stranded MDM2-saRNA may have at least 60%, 70%, 80% or 90% identity with a sequence selected from the sequences of the sense strands in Table 44-2. In one embodiment, the second strand of the double-stranded saRNA comprises a sequence selected from the sequences of the sense strands in Table 44-2. In one embodiment, the double-stranded MDM2-saRNA may have a 3′ overhang on each strand. The first strand of a double-stranded MDM2-saRNA may have at least 60%, 70%, 80% or 90% identity with a sequence selected from the sequences of the antisense strands in Table 45. In one embodiment, the first strand of the double-stranded saRNA comprises a sequence selected from the sequences of the antisense strands in Table 45. The second strand of a double-stranded MDM2-saRNA may have at least 60%, 70%, 80% or 90% identity with a sequence selected from the sequences of the sense strands in Table 45. In one embodiment, the second strand of the double-stranded saRNA comprises a sequence selected from the sequences of the sense strands in Table 45.

[0483] MDM2-saRNAs may be modified or unmodified.

[0484] Table 44-1 describes the target gene, the targeted sequence, the genomic location of the targeted sequence and the relative location of MDM2-saRNAs with no 3′ overhang. In Table 44-1, the targeted sequence is defined as a region on the template strand of the target gene which is identical to a region on the target antisense RNA transcript to which the antisense strand of an saRNA hybridizes. In Table 44-1, the relative location is the distance from the 5′ end of the targeted sequence to the TSS. A negative number represents a location upstream of the TSS and a positive number represents a location downstream of the TSS.

TABLE 44-1
Sequences of MDM2-saRNAs (with no 3′ overhang)

| | | Targeted | Targeted | Genomic Location of | Relative |
|---|---|---|---|---|---|
| saRNA ID | Target Gene | sequence | sequence ID | the Targeted sequence | Location |
| MDM2.NM_001145337- | MDM2 human | aattgaggtatacgaa | 1735 | chr12: 69203132 minus | 355 |
| Pr-10 | | att | | strand | |
| MDM2.NM_001145337- | MDM2 human | gtttcatcttgttagtaca | 1736 | chr12: 69203563 minus | 786 |
| Pr-14 | | | | strand | |
| MDM2.NM_001145337- | MDM2 human | agcggcactatctgta | 1737 | chr12: 69203736 minus | 959 |
| Pr-18 | | ata | | strand | |
| MDM2.NM_001145337- | MDM2 human | cgaaatttagtttatca | 1738 | chr12: 69203120 minus | 343 |
| Pr-20 | | ct | | strand | |
| MDM2.NM_001145337- | MDM2 human | cggcactatctgtaat | 1739 | chr12: 69203734 minus | 957 |
| Pr-22 | | act | | strand | |
| MDM2.NM_001145337- | MDM2 human | ggagacaagtcagga | 1740 | chr12: 69202743 minus | −34 |
| Pr-33 | | ctta | | strand | |
| MDM2.NM_001145337- | MDM2 human | gtatactcatgctgtgg | 1741 | chr12: 69203655 minus | 878 |
| Pr-35 | | aa | | strand | |
| MDM2.NM_001145337- | MDM2 human | aactggaaatcatgaa | 1742 | chr12: 69202941 minus | 164 |
| Pr-40 | | aca | | strand | |
| MDM2.NM_002392- | MDM2 human | tggagttgtacccaaa | 1743 | chr12: 69201539 minus | −393 |
| Pr-1 | | tga | | strand | |
| MDM2.NM_002392- | MDM2 human | ttgatgcggtctcataa | 1744 | chr12: 69200954 minus | −978 |
| Pr-6 | | at | | strand | |
| MDM2.NM_002392- | MDM2 human | gttgtacccaaatgag | 1745 | chr12: 69201535 minus | −397 |
| Pr-12 | | tta | | strand | |
| MDM2.NM_002392- | MDM2 human | aaagtttgggtttgtta | 1746 | chr12: 69201065 minus | −867 |
| Pr-22 | | at | | strand | |
| MDM2.NM_002392- | MDM2 human | ggagacaagtcagga | 1747 | chr12: 69202743 minus | 811 |
| Pr-23 | | ctta | | strand | |
| MDM2.NM_002392- | MDM2 human | ggtggaaactgcgac | 1748 | chr12: 69201638 minus | −294 |
| Pr-24 | | aaat | | strand | |
| MDM2.NM_002392- | MDM2 human | gtttgggtttgttaatcta | 1749 | chr12: 69201062 minus | −870 |
| Pr-26 | | | | strand | |
| MDM2.NM_002392- | MDM2 human | gctccatctttccgaca | 1750 | chr12: 69202014 minus | 82 |
| Pr-33 | | ca | | strand | |
| MDM2.NM_002392- | MDM2 human | aaggtttggcgctgtg | 1751 | chr12: 69201712 minus | −220 |
| Pr-34 | | aca | | strand | |

TABLE 44-2
Sequences of MDM2-saRNAs (with no 3′ overhang)

| | | Sense SEQ | | Anti-sense |
|---|---|---|---|---|
| saRNA ID | Sense (passenger) | ID | Antisense (guide) | SEQ ID |
| MDM2.NM_001145337- | AAUUGAGGUAUA | 1752 | AAUUUCGUAUAC | 1753 |
| Pr-10 | CGAAAUU | | CUCAAUU | |
| MDM2.NM_001145337- | GUUUCAUCUUGU | 1754 | UGUACUAACAAG | 1755 |
| Pr-14 | UAGUACA | | AUGAAAC | |
| MDM2.NM_001145337- | AGCGGCACUAUC | 1756 | UAUUACAGAUAG | 1757 |
| Pr-18 | UGUAAUA | | UGCCGCU | |
| MDM2.NM_001145337- | CGAAAUUUAGUU | 1758 | AGUGAUAAACUA | 1759 |
| Pr-20 | UAUCACU | | AAUUUCG | |
| MDM2.NM_001145337- | CGGCACUAUCUG | 1760 | AGUAUUACAGAU | 1761 |
| Pr-22 | UAAUACU | | AGUGCCG | |
| MDM2.NM_001145337- | GGAGACAAGUCA | 1762 | UAAGUCCUGACU | 1763 |
| Pr-33 | GGACUUA | | UGUCUCC | |
| MDM2.NM_001145337- | GUAUACUCAUGC | 1764 | UUCCACAGCAUG | 1765 |
| Pr-35 | UGUGGAA | | AGUAUAC | |
| MDM2.NM_001145337- | AACUGGAAAUCA | 1766 | UGUUUCAUGAUU | 1767 |
| Pr-40 | UGAAACA | | UCCAGUU | |
| MDM2.NM_002392- | UGGAGUUGUACC | 1768 | UCAUUUGGGUAC | 1769 |
| Pr-1 | CAAAUGA | | AACUCCA | |
| MDM2.NM_002392- | UUGAUGCGGUCU | 1770 | AUUUAUGAGACC | 1771 |
| Pr-6 | CAUAAAU | | GCAUCAA | |
| MDM2.NM_002392- | GUUGUACCCAAA | 1772 | UAACUCAUUUGG | 1773 |
| Pr-12 | UGAGUUA | | GUACAAC | |
| MDM2.NM_002392- | AAAGUUUGGGUU | 1774 | AUUAACAAACCC | 1775 |
| Pr-22 | UGUUAAU | | AAACUUU | |
| MDM2.NM_002392- | GGAGACAAGUCA | 1776 | UAAGUCCUGACU | 1777 |
| Pr-23 | GGACUUA | | UGUCUCC | |
| MDM2.NM_002392- | GGUGGAAACUGC | 1778 | AUUUGUCGCAGU | 1779 |
| Pr-24 | GACAAAU | | UUCCACC | |
| MDM2.NM_002392- | GUUUGGGUUUGU | 1780 | UAGAUUAACAAA | 1781 |
| Pr-26 | UAAUCUA | | CCCAAAC | |
| MDM2.NM_002392- | GCUCCAUCUUUC | 1782 | UGUGUCGGAAAG | 1783 |
| Pr-33 | CGACACA | | AUGGAGC | |
| MDM2.NM_002392- | AAGGUUUGGCGC | 1784 | UGUCACAGCGCC | 1785 |
| Pr-34 | UGUGACA | | AAACCUU | |

TABLE 45
Sequences of MDM2-saRNAs (with 3′ overhang)

| | | Sense | | Antisense |
|---|---|---|---|---|
| saRNA ID | Sense (passenger) | SEQ ID | Antisense (guide) | SEQ ID |
| MDM2.NM_001145337- | AAUUGAGGUAUACG | 1786 | AAUUUCGUAUACC | 1787 |
| Pr-10′ | AAAUUUU | | UCAAUUUU | |
| MDM2.NM_001145337- | GUUUCAUCUUGUUA | 1788 | UGUACUAACAAGA | 1789 |
| Pr-14′ | GUACAUU | | UGAAACUU | |
| MDM2.NM_001145337- | AGCGGCACUAUCUG | 1790 | UAUUACAGAUAGU | 1791 |
| Pr-18′ | UAAUAUU | | GCCGCUUU | |
| MDM2.NM_001145337- | CGAAAUUUAGUUUA | 1792 | AGUGAUAAACUAA | 1793 |
| Pr-20′ | UCACUUU | | AUUUCGUU | |
| MDM2.NM_001145337- | CGGCACUAUCUGUA | 1794 | AGUAUUACAGAUA | 1795 |
| Pr-22′ | AUACUUU | | GUGCCGUU | |
| MDM2.NM_001145337- | GGAGACAAGUCAGG | 1796 | UAAGUCCUGACUU | 1797 |
| Pr-33′ | ACUUAUU | | GUCUCCUU | |
| MDM2.NM_001145337- | GUAUACUCAUGCUG | 1798 | UUCCACAGCAUGAG | 1799 |
| Pr-35′ | UGGAAUU | | UAUACUU | |
| MDM2.NM_001145337- | AACUGGAAAUCAUG | 1800 | UGUUUCAUGAUUU | 1801 |
| Pr-40′ | AAACAUU | | CCAGUUUU | |
| MDM2.NM_002392-Pr-1′ | UGGAGUUGUACCCA | 1802 | UCAUUUGGGUACA | 1803 |
| | AAUGAUU | | ACUCCAUU | |
| MDM2.NM_002392-Pr-6′ | UUGAUGCGGUCUCA | 1804 | AUUUAUGAGACCG | 1805 |
| | UAAAUUU | | CAUCAAUU | |
| MDM2.NM_002392-Pr- | GUUGUACCCAAAUG | 1806 | UAACUCAUUUGGG | 1807 |
| 12′ | AGUUAUU | | UACAACUU | |
| MDM2.NM_002392-Pr- | AAAGUUUGGGUUUG | 1808 | AUUAACAAACCCAA | 1809 |
| 22′ | UUAAUUU | | ACUUUUU | |
| MDM2.NM_002392-Pr- | GGAGACAAGUCAGG | 1810 | UAAGUCCUGACUU | 1811 |
| 23′ | ACUUAUU | | GUCUCCUU | |
| MDM2.NM_002392-Pr- | GGUGGAAACUGCGA | 1812 | AUUUGUCGCAGUU | 1813 |
| 24′ | CAAAUUU | | UCCACCUU | |
| MDM2.NM_002392-Pr- | GUUUGGGUUUGUUA | 1814 | UAGAUUAACAAAC | 1815 |
| 26′ | AUCUAUU | | CCAAACUU | |
| MDM2.NM_002392-Pr- | GCUCCAUCUUUCCG | 1816 | UGUGUCGGAAAGA | 1817 |
| 33′ | ACACAUU | | UGGAGCUU | |
| MDM2.NM_002392-Pr- | AAGGUUUGGCGCUG | 1818 | UGUCACAGCGCCAA | 1819 |
| 34′ | UGACAUU | | ACCUUUU | |

[0485] MDM2 gene encodes Mouse double minute 2 homolog (MDM2) protein, also known as E3 ubiquitin-protein ligase. Recent studies have revealed the MDM2-p53 interaction to be complex involving multiple levels of regulation by numerous cellular proteins and epigenetic mechanisms (Nag et al., J Biomed Res., vol 27(4):254 (2013), the contents of which are incorporated herein by reference in their entirety).

[0486] In one embodiment, provided is a method of modulating MDM2 protein levels comprising administering MDM2-saRNA of the present invention, wherein the MDM2-saRNA targets an antisense RNA transcript of MDM2 gene. In one embodiment, MDM2 protein level is increased by at least 20, 30, 40%, or at least 45, 50, 55, 60, 65, 70, 75%, or at least 80% in the presence of the MDM2-saRNA of the present invention compared to MDM2 protein level in the absence of the MDM2-saRNA of the present invention. In a further embodiment, MDM2 protein level is increased by a factor of at least 2, 3, 4, 5, 6, 7, 8, 9, 10, or by a factor of at least 15, 20, 25, 30, 35, 40, 45, 50, or by a factor of at least 60, 70, 80, 90, 100, in the presence of the MDM2-saRNA of the present invention compared to MDM2 protein level in the absence of the MDM2-saRNA of the present invention. In another embodiment, provided is a method of modulating p53 protein levels, comprising administering MDM2-saRNA of the present invention, wherein the MDM2-saRNA targets an antisense RNA transcript of MDM2 gene.

[0487] In another embodiment, provided is a method of modulating p53 protein levels comprising administering MDM2-saRNA of the present invention, wherein the MDM2-saRNA targets an antisense RNA transcript of MDM2 gene. In another embodiment, provided is a method of modulating apoptosis of a tumor cell comprising administering MDM2-saRNA of the present invention, wherein the MDM2-saRNA targets an antisense RNA transcript of MDM2 gene.

[0488] In one embodiment, the MDM2-saRNA of the present invention is an antisense sequence such as, but not limited to, SEQ ID NO: 1753, 1755, 1757, 1759, 1761, 1763, 1765, 1767, 1769, 1771, 1773, 1775, 1777, 1779, 1781, 1783, 1785, 1787, 1789, 1791, 1793, 1795, 1797, 1799, 1801, 1803, 1805, 1807, 1809, 1811, 1813, 1815, 1817, 1819, 4910, 4912, 4914, 4916, 4918, 4920, 4922, 4924, 4926, 4928, 4930, 4932, 4934, 4936, 4938, 4940, 4942, 4944, 4946, 4948, 4950, 4952, 4954, 4956, 4958, 4960, 4962, 4964, 4966, 4968, 4970, 4972, 4974, 4976, 4978, 4980, 4982, 4984, 4986, 4988, 4990, 4992, 4994, 4996, 4998, 5000, 5002, 5004, 5006, 5008, 5010, 5012, 5014, 5016, 5018, 5020, 5022, 5024, 5026, 5028, 5030, 5032, 5034, 5036, 5038, 5040, 5042, 5044, 5046, 5048, 5050, 5052, 5054, 5056, 5058, 5060, 5062, 5064, 5066, 5068, 5070, 5072 and 5074. As a non-limiting example, these MDM2-saRNA sequences may be used to modulate MDM2 protein levels and/or modulating p53 protein levels.

[0489] In one embodiment, the MDM2-saRNA of the present invention is an saRNA duplex. The saRNA duplex may be a pair of sense and antisense sequences such as, but not limited to, SEQ ID NOs: 1752 and 1753; SEQ ID NOs: 1754 and 1755; SEQ ID NOs: 1756 and 1757; SEQ ID NOs: 1758 and 1759; SEQ ID NOs: 1760 and 1761; SEQ ID NOs: 1762 and 1763; SEQ ID NOs: 1764 and 1765; SEQ ID NOs: 1766 and 1767; SEQ ID NOs: 1768 and 1769; SEQ ID NOs: 1770 and 1771; SEQ ID NOs: 1772 and 1773; SEQ ID NOs: 1774 and 1775; SEQ ID NOs: 1776 and 1777; SEQ ID NOs: 1778 and 1779; SEQ ID NOs: 1780 and 1781; SEQ ID NOs: 1782 and 1783; SEQ ID NOs: 1784 and 1785; SEQ ID NOs: 1786 and 1787; SEQ ID NOs: 1788 and 1789; SEQ ID NOs: 1790 and 1791; SEQ ID NOs: 1792 and 1793; SEQ ID NOs: 1794 and 1795; SEQ ID NOs: 1796 and 1797; SEQ ID NOs: 1798 and 1799; SEQ ID NOs: 1800 and 1801; SEQ ID NOs: 1802 and 1803; SEQ ID NOs: 1804 and 1805; SEQ ID NOs: 1806 and 1807; SEQ ID NOs: 1808 and 1809; SEQ ID NOs: 1810 and 1811; SEQ ID NOs: 1812 and 1813; SEQ ID NOs: 1814 and 1815; SEQ ID NOs: 1816 and 1817; SEQ ID NOs: 1818 and 1819; SEQ ID NOs: 4909 and 4910; SEQ ID NOs: 4911 and 4912; SEQ ID NOs: 4913 and 4914; SEQ ID NOs: 4915 and 4916; SEQ ID NOs: 4917 and 4918; SEQ ID NOs: 4919 and 4920; SEQ ID NOs: 4921 and 4922; SEQ ID NOs: 4923 and 4924; SEQ ID NOs: 4925 and 4926; SEQ ID NOs: 4927 and 4928; SEQ ID NOs: 4929 and 4930; SEQ ID NOs: 4931 and 4932; SEQ ID NOs: 4933 and 4934; SEQ ID NOs: 4935 and 4936; SEQ ID NOs: 4937 and 4938; SEQ ID NOs: 4939 and 4940; SEQ ID NOs: 4941 and 4942; SEQ ID NOs: 4943 and 4944; SEQ ID NOs: 4945 and 4946; SEQ ID NOs: 4947 and 4948; SEQ ID NOs: 4949 and 4950; SEQ ID NOs: 4951 and 4952; SEQ ID NOs: 4953 and 4954; SEQ ID NOs: 4955 and 4956; SEQ ID NOs: 4957 and 4958; SEQ ID NOs: 4959 and 4960; SEQ ID NOs: 4961 and 4962; SEQ ID NOs: 4963 and 4964; SEQ ID NOs: 4965 and 4966; SEQ ID NOs: 4967 and 4968; SEQ ID NOs: 4969 and 4970; SEQ ID NOs: 4971 and 4972; SEQ ID NOs: 4973 and 4974; SEQ ID NOs: 4975 and 4976; SEQ ID NOs: 4977 and 4978; SEQ ID NOs: 4979 and 4980; SEQ ID NOs: 4981 and 4982; SEQ ID NOs: 4983 and 4984; SEQ ID NOs: 4985 and 4986; SEQ ID NOs: 4987 and 4988; SEQ ID NOs: 4989 and 4990; SEQ ID NOs: 4991 and 4992; SEQ ID NOs: 4993 and 4994; SEQ ID NOs: 4995 and 4996; SEQ ID NOs: 4997 and 4998; SEQ ID NOs: 4999 and 5000; SEQ ID NOs: 5001 and 5002; SEQ ID NOs: 5003 and 5004; SEQ ID NOs: 5005 and 5006; SEQ ID NOs: 5007 and 5008; SEQ ID NOs: 5009 and 5010; SEQ ID NOs: 5011 and 5012; SEQ ID NOs: 5013 and 5014; SEQ ID NOs: 5015 and 5016; SEQ ID NOs: 5017 and 5018; SEQ ID NOs: 5019 and 5020; SEQ ID NOs: 5021 and 5022; SEQ ID NOs: 5023 and 5024; SEQ ID NOs: 5025 and 5026; SEQ ID NOs: 5027 and 5028; SEQ ID NOs: 5029 and 5030; SEQ ID NOs: 5031 and 5032; SEQ ID NOs: 5033 and 5034; SEQ ID NOs: 5035 and 5036; SEQ ID NOs: 5037 and 5038; SEQ ID NOs: 5039 and 5040; SEQ ID NOs: 5041 and 5042; SEQ ID NOs: 5043 and 5044; SEQ ID NOs: 5045 and 5046; SEQ ID NOs: 5047 and 5048; SEQ ID NOs: 5049 and 5050; SEQ ID NOs: 5051 and 5052; SEQ ID NOs: 5053 and 5054; SEQ ID NOs: 5055 and 5056; SEQ ID NOs: 5057 and 5058; SEQ ID NOs: 5059 and 5060; SEQ ID NOs: 5061 and 5062; SEQ ID NOs: 5063 and 5064; SEQ ID NOs: 5065 and 5066; SEQ ID NOs: 5067 and 5068; SEQ ID NOs: 5069 and 5070; SEQ ID NOs: 5071 and 5072; SEQ ID NOs: 5073 and 5074. As a non-limiting example, these MDM2-saRNA sequences which are saRNA duplexes may be used to modulate MDM2 protein levels and/or modulating p53 protein levels.

### C19or80 Gene

[0490] As another non-limiting example, provided is a method of modulating the expression of c19orf0 gene comprising administering saRNA of the present invention, wherein the saRNA targets an antisense RNA transcript of c19orf80 gene. These saRNAs are called c19orf80-saRNA. In one embodiment, the expression of c19orf80 gene is increased by at least 20, 30, 40%, or at least 45, 50, 55, 60, 65, 70, 75%, or at least 80% in the presence of the c19orf0-saRNA of the present invention compared to the expression of c19orf80 gene in the absence of the c19orf80-saRNA of the present invention. In a further embodiment, the expression of c19orf80 gene is increased by a factor of at least 2, 3, 4, 5, 6, 7, 8, 9, 10, or by a factor of at least 15, 20, 25, 30, 35, 40, 45, 50, or by a factor of at least 60, 70, 80, 90, 100, in the presence of the c19orf80-saRNA of the present invention compared to the expression of c19orf80 gene in the absence of the c19orf80-saRNA of the present invention. The modulation of the expression of c19orf80 gene may be reflected or determined by the change of c19orf0 mRNA levels.

[0491] C19ORF80-saRNAs may be single-stranded and comprise 14-30 nucleotides. The sequence of a single-stranded C19ORF80-saRNA may have at least 60%, 70%, 80% or 90% identity with a sequence selected from the sequences of the antisense strands in Table 46-2. In one embodiment, the single-stranded saRNA comprises a sequence selected from the sequences of the antisense strands in Table 46-2. In one embodiment, the single-stranded C19ORF80-saRNA may have a 3′ tail. The sequence of a single-stranded C19ORF80-saRNA with a 3′ tail may have at least 60%, 70%, 80% or 90% identity with a sequence selected from the sequences of the antisense strands in Table 47. In one embodiment, the single-stranded saRNA comprises a sequence selected from the sequences of the antisense strands in Table 47.

[0492] C19ORF80-saRNAs may be double-stranded. The two strands form a duplex and each strand comprises 14-30 nucleotides. The first strand of a double-stranded C19ORF80-saRNA may have at least 60%, 70%, 80% or 90% identity with a sequence selected from the sequences of the antisense strands in Table 46-2. In one embodiment, the first strand of the double-stranded saRNA comprises a sequence selected from the sequences of the antisense strands in Table 46-2. The second strand of a double-stranded C19ORF80-saRNA may have at least 60%, 70%, 80% or 90% identity with a sequence selected from the sequences of the sense strands in Table 46-2. In one embodiment, the second strand of the double-stranded saRNA comprises a sequence selected from the sequences of the sense strands in Table 46-2. In one embodiment, the double-stranded C19ORF80-saRNA may have a 3′ overhang on each strand. The first strand of a double-stranded C19ORF80-saRNA may have at least 60%, 70%, 80% or 90% identity with a sequence selected from the sequences of the antisense strands in Table 47. In one embodiment, the first strand of the double-stranded saRNA comprises a sequence selected from the sequences of the antisense strands in Table 47. The second strand of a double-stranded C19ORF80-saRNA may have at least 60%, 70%, 80% or 90% identity with a sequence selected from the sequences of the sense strands in Table 47. In one embodiment, the second strand of the double-stranded saRNA comprises a sequence selected from the sequences of the sense strands in Table 47.

[0493] C19ORF80-saRNAs may be modified or unmodified.

[0494] Table 46-1 describes the target gene, the targeted sequence, the genomic location of the targeted sequence and the relative location of C19orf80-saRNAs with no 3′ overhang. In Table 46-1, the targeted sequence is defined as a region on the template strand of the target gene which is identical to a region on the target antisense RNA transcript to which the antisense strand of an saRNA hybridizes. In Table 46-1, the relative location is the distance from the 5′ end of the targeted sequence to the TSS. A negative number represents a location upstream of the TSS and a positive number represents a location downstream of the TSS.

TABLE 46-1
Sequences of C19ORF80-saRNAs (with no 3′ overhang)

| | | | Targeted | | |
|---|---|---|---|---|---|
| | | | sequence | Genomic Location of the | Relative |
| saRNA ID | Target Gene | Targeted sequence | ID | Targeted sequence | Location |
| C19orf80.NM_018687- | C19orf80 | gcgagttctggccggaa | 1820 | chr19: 11351010 minus | 735 |
| Pr-1 | human | at | | strand | |
| C19orf80.NM_018687- | C19orf80 | gagttctggccggaaat | 1821 | chr19: 11351008 minus | 733 |
| Pr-6 | human | ca | | strand | |
| C19orf80.NM_018687- | C19orf80 | agcgagttctggccgga | 1822 | chr19: 11351011 minus | 736 |
| Pr-7 | human | aa | | strand | |
| C19orf80.NM_018687- | C19orf80 | gcctgagtttatcgctgaa | 1823 | chr19: 11350728 minus | 453 |
| Pr-11 | human | | | strand | |
| C19orf80.NM_018687- | C19orf80 | gcctgaagtgcccattata | 1824 | chr19: 11349513 minus | −762 |
| Pr-13 | human | | | strand | |
| C19orf80.NM_018687- | C19orf80 | cgagttctggccggaaa | 1825 | chr19: 11351009 minus | 734 |
| Pr-18 | human | tc | | strand | |
| C19orf80.NM_018687- | C19orf80 | aggacttgcctgagtttat | 1826 | chr19: 11350735 minus | 460 |
| Pr-19 | human | | | strand | |
| C19orf80.NM_018687- | C19orf80 | cgattatttcattgttgta | 1827 | chr19: 11349609 minus | −666 |
| Pr-21 | human | | | strand | |
| C19orf80.NM_018687- | C19orf80 | agctacttgtgagaagtaa | 1828 | chr19: 11349680 minus | −595 |
| Pr-23 | human | | | strand | |
| C19orf80.NM_018687- | C19orf80 | tgggagttcctgagact | 1829 | chr19: 11350050 minus | −225 |
| Pr-25 | human | ca | | strand | |
| C19orf80.NM_018687- | C19orf80 | tcatgagctacttgtgaga | 1830 | chr19: 11349685 minus | −590 |
| Pr-26 | human | | | strand | |
| C19orf80.NM_018687- | C19orf80 | gttgagtgcttagaaca | 1831 | chr19: 11349647 minus | −628 |
| Pr-28 | human | ga | | strand | |
| C19orf80.NM_018687- | C19orf80 | aatagtgtttggtgcaatt | 1832 | chr19: 11349588 minus | −687 |
| Pr-33 | human | | | strand | |
| C19orf80.NM_018687- | C19orf80 | gtaatagtgtttggtgcaa | 1833 | chr19: 11349590 minus | −685 |
| Pr-39 | human | | | strand | |

TABLE 46-2
Sequences of C19ORF80-saRNAs (with no 3′ overhang)

| | | Sense | | Anti-sense SEQ |
|---|---|---|---|---|
| saRNA ID | Sense (passenger) | SEQ ID | Antisense (guide) | ID |
| C19orf80.NM_018687- | GCGAGUUCUGGCC | 1834 | AUUUCCGGCCAGAAC | 1835 |
| Pr-1 | GGAAAU | | UCGC | |
| C19orf80.NM_018687- | GAGUUCUGGCCGG | 1836 | UGAUUUCCGGCCAGA | 1837 |
| Pr-6 | AAAUCA | | ACUC | |
| C19orf80.NM_018687- | AGCGAGUUCUGGC | 1838 | UUUCCGGCCAGAACU | 1839 |
| Pr-7 | CGGAAA | | CGCU | |
| C19orf80.NM_018687- | GCCUGAGUUUAUC | 1840 | UUCAGCGAUAAACUC | 1841 |
| Pr-11 | GCUGAA | | AGGC | |
| C19orf80.NM_018687- | GCCUGAAGUGCCC | 1842 | UAUAAUGGGCACUUC | 1843 |
| Pr-13 | AUUAUA | | AGGC | |
| C19orf80.NM_018687- | CGAGUUCUGGCCG | 1844 | GAUUUCCGGCCAGAA | 1845 |
| Pr-18 | GAAAUC | | CUCG | |
| C19orf80.NM_018687- | AGGACUUGCCUGA | 1846 | AUAAACUCAGGCAAG | 1847 |
| Pr-19 | GUUUAU | | UCCU | |
| C19orf80.NM_018687- | CGAUUAUUUCAUU | 1848 | UACAACAAUGAAAUA | 1849 |
| Pr-21 | GUUGUA | | AUCG | |
| C19orf80.NM_018687- | AGCUACUUGUGAG | 1850 | UUACUUCUCACAAGU | 1851 |
| Pr-23 | AAGUAA | | AGCU | |
| C19orf80.NM_018687- | UGGGAGUUCCUGA | 1852 | UGAGUCUCAGGAACU | 1853 |
| Pr-25 | GACUCA | | CCCA | |
| C19orf80.NM_018687- | UCAUGAGCUACUU | 1854 | UCUCACAAGUAGCUC | 1855 |
| Pr-26 | GUGAGA | | AUGA | |
| C19orf80.NM_018687- | GUUGAGUGCUUAG | 1856 | UCUGUUCUAAGCACU | 1857 |
| Pr-28 | AACAGA | | CAAC | |
| C19orf80.NM_018687- | AAUAGUGUUUGG | 1858 | AAUUGCACCAAACAC | 1859 |
| Pr-33 | UGCAAUU | | UAUU | |
| C19orf80.NM_018687- | GUAAUAGUGUUU | 1860 | UUGCACCAAACACUA | 1861 |
| Pr-39 | GGUGCAA | | UUAC | |

TABLE 47
Sequences of C19orf80-saRNAs (with 3′ overhang)

| | | Sense SEQ | | Antisense |
|---|---|---|---|---|
| saRNA ID | Sense (passenger) | ID | Antisense (guide) | SEQ ID |
| C19orf80.NM_018687- | GCGAGUUCUGGCCGG | 1862 | AUUUCCGGCCAGAA | 1863 |
| Pr-1′ | AAAUUU | | CUCGCUU | |
| C19orf80.NM_018687- | GAGUUCUGGCCGGA | 1864 | UGAUUUCCGGCCAG | 1865 |
| Pr-6′ | AAUCAUU | | AACUCUU | |
| C19orf80.NM_018687- | AGCGAGUUCUGGCCG | 1866 | UUUCCGGCCAGAAC | 1867 |
| Pr-7′ | GAAAUU | | UCGCUUU | |
| C19orf80.NM_018687- | GCCUGAGUUUAUCGC | 1868 | UUCAGCGAUAAACU | 1869 |
| Pr-11′ | UGAAUU | | CAGGCUU | |
| C19orf80.NM_018687- | GCCUGAAGUGCCCAU | 1870 | UAUAAUGGGCACUU | 1871 |
| Pr-13′ | UAUAUU | | CAGGCUU | |
| C19orf80.NM_018687- | CGAGUUCUGGCCGGA | 1872 | GAUUUCCGGCCAGA | 1873 |
| Pr-18′ | AAUCUU | | ACUCGUU | |
| C19orf80.NM_018687- | AGGACUUGCCUGAG | 1874 | AUAAACUCAGGCAA | 1875 |
| Pr-19′ | UUUAUUU | | GUCCUUU | |
| C19orf80.NM_018687- | CGAUUAUUUCAUUG | 1876 | UACAACAAUGAAAU | 1877 |
| Pr-21′ | UUGUAUU | | AAUCGUU | |
| C19orf80.NM_018687- | AGCUACUUGUGAGA | 1878 | UUACUUCUCACAAG | 1879 |
| Pr-23′ | AGUAAUU | | UAGCUUU | |
| C19orf80.NM_018687- | UGGGAGUUCCUGAG | 1880 | UGAGUCUCAGGAAC | 1881 |
| Pr-25′ | ACUCAUU | | UCCCAUU | |
| C19orf80.NM_018687- | UCAUGAGCUACUUG | 1882 | UCUCACAAGUAGCU | 1883 |
| Pr-26′ | UGAGAUU | | CAUGAUU | |
| C19orf80.NM_018687- | GUUGAGUGCUUAGA | 1884 | UCUGUUCUAAGCAC | 1885 |
| Pr-28′ | ACAGAUU | | UCAACUU | |
| C19orf80.NM_018687- | AAUAGUGUUUGGUG | 1886 | AAUUGCACCAAACA | 1887 |
| Pr-33′ | CAAUUUU | | CUAUUUU | |
| C19orf80.NM_018687- | GUAAUAGUGUUUGG | 1888 | UUGCACCAAACACU | 1889 |
| Pr-39′ | UGCAAUU | | AUUACUU | |

[0495] C19orf80 gene encodes betatrophin, a protein that modulates autophagy, lipid metabolism and fat metabolism (Ren et al., Am J Physiol Endocrinol Metab., vol. 303 (3):E334 (2012); Tseng et al., Autophagy, vol. 10 (1):20 (2014), the contents of each of which are incorporated herein by reference in their entirety).

[0496] In one embodiment, provided is a method of modulating betatrophin protein levels comprising administering c19orf80-saRNA of the present invention, wherein the c19orf80-saRNA targets an antisense RNA transcript of c19orf80 gene. In one embodiment, betatrophin protein level is increased by at least 20, 30, 40%, or at least 45, 50, 55, 60, 65, 70, 75%, or at least 80% in the presence of the c19orf80-saRNA of the present invention compared to betatrophin protein level in the absence of the c19orf80-saRNA of the present invention. In a further embodiment, betatrophin protein level is increased by a factor of at least 2, 3, 4, 5, 6, 7, 8, 9, 10, or by a factor of at least 15, 20, 25, 30, 35, 40, 45, 50, or by a factor of at least 60, 70, 80, 90, 100, in the presence of the c19orf80-saRNA of the present invention compared to betatrophin protein level in the absence of the c19orf80-saRNA of the present invention.

[0497] In another embodiment, provided is a method of regulate autophagy and lipid metabolism comprising administering c19orf80-saRNA of the present invention, wherein the c19orf80-saRNA targets an antisense RNA transcript of c19orf80 gene. In another embodiment, provided is a method of regulating insulin or triglyceride levels comprising administering c19orf80-saRNA of the present invention, wherein the c19orf80-saRNA targets an antisense RNA transcript of c19orf80 gene. In another embodiment, provided is a method of treating obesity comprising administering c19orf80-saRNA of the present invention, wherein the c19orf80-saRNA targets an antisense RNA transcript of c19orf80 gene. In another embodiment, provided is a method of treating type II or type I diabetes comprising administering saRNA of the present invention, wherein the saRNA targets an antisense RNA transcript of c19orf80 gene.

[0498] In one embodiment, the C19orf80-saRNA of the present invention is an antisense sequence such as, but not limited to, SEQ ID NO: 1835, 1837, 1839, 1841, 1843, 1845, 1847, 1849, 1851, 1853, 1855, 1857, 1859, 1861, 1863, 1865, 1867, 1869, 1871, 1873, 1875, 1877, 1879, 1881, 1883, 1885, 1887, 1889, 2162, 2164, 2166, 2168, 2170, 2172, 2174, 2176, 2178, 2180, 2182, 2184, 2186, 2188, 2190, 2192, 2194, 2196, 2198, 2200, 2202, 2204, 2206, 2208, 2210, 2212, 2214, 2216, 2218, 2220, 2222, 2224, 2226, 2228, 2230, 2232, 2234, 2236, 2238, 2240, 2242, 2244, 2246, 2248, 2250, 2252, 2254, 2256, 2258 and 2260. As a non-limiting example, these C19orf80-saRNA sequences may be used to modulate betatrophin protein levels, regulating autophagy and lipid metabolism, treating obesity and/or treating type II or type I diabetes.

[0499] In one embodiment, the C19orf80-saRNA of the present invention is an saRNA duplex. The saRNA duplex may be a pair of sense and antisense sequences such as, but not limited to, SEQ ID NOs: 1834 and 1835; SEQ ID NOs: 1836 and 1837; SEQ ID NOs: 1838 and 1839; SEQ ID NOs: 1840 and 1841; SEQ ID NOs: 1842 and 1843; SEQ ID NOs: 1844 and 1845; SEQ ID NOs: 1846 and 1847; SEQ ID NOs: 1848 and 1849; SEQ ID NOs: 1850 and 1851; SEQ ID NOs: 1852 and 1853; SEQ ID NOs: 1854 and 1855; SEQ ID NOs: 1856 and 1857; SEQ ID NOs: 1858 and 1859; SEQ ID NOs: 1860 and 1861; SEQ ID NOs: 1862 and 1863; SEQ ID NOs: 1864 and 1865; SEQ ID NOs: 1866 and 1867; SEQ ID NOs: 1868 and 1869; SEQ ID NOs: 1870 and 1871; SEQ ID NOs: 1872 and 1873; SEQ ID NOs: 1874 and 1875; SEQ ID NOs: 1876 and 1877; SEQ ID NOs: 1878 and 1879; SEQ ID NOs: 1880 and 1881; SEQ ID NOs: 1882 and 1883; SEQ ID NOs: 1884 and 1885; SEQ ID NOs: 1886 and 1887; SEQ ID NOs: 1888 and 1889; SEQ ID NOs: 2161 and 2162; SEQ ID NOs: 2163 and 2164; SEQ ID NOs: 2165 and 2166; SEQ ID NOs: 2167 and 2168; SEQ ID NOs: 2169 and 2170; SEQ ID NOs: 2171 and 2172; SEQ ID NOs: 2173 and 2174; SEQ ID NOs: 2175 and 2176; SEQ ID NOs: 2177 and 2178; SEQ ID NOs: 2179 and 2180; SEQ ID NOs: 2181 and 2182; SEQ ID NOs: 2183 and 2184; SEQ ID NOs: 2185 and 2186; SEQ ID NOs: 2187 and 2188; SEQ ID NOs: 2189 and 2190; SEQ ID NOs: 2191 and 2192; SEQ ID NOs: 2193 and 2194; SEQ ID NOs: 2195 and 2196; SEQ ID NOs: 2197 and 2198; SEQ ID NOs: 2199 and 2200; SEQ ID NOs: 2201 and 2202; SEQ ID NOs: 2203 and 2204; SEQ ID NOs: 2205 and 2206; SEQ ID NOs: 2207 and 2208; SEQ ID NOs: 2209 and 2210; SEQ ID NOs: 2211 and 2212; SEQ ID NOs: 2213 and 2214; SEQ ID NOs: 2215 and 2216; SEQ ID NOs: 2217 and 2218; SEQ ID NOs: 2219 and 2220; SEQ ID NOs: 2221 and 2222; SEQ ID NOs: 2223 and 2224; SEQ ID NOs: 2225 and 2226; SEQ ID NOs: 2227 and 2228; SEQ ID NOs: 2229 and 2230; SEQ ID NOs: 2231 and 2232; SEQ ID NOs: 2233 and 2234; SEQ ID NOs: 2235 and 2236; SEQ ID NOs: 2237 and 2238; SEQ ID NOs: 2239 and 2240; SEQ ID NOs: 2241 and 2242; SEQ ID NOs: 2243 and 2244; SEQ ID NOs: 2245 and 2246; SEQ ID NOs: 2247 and 2248; SEQ ID NOs: 2249 and 2250; SEQ ID NOs: 2251 and 2252; SEQ ID NOs: 2253 and 2254; SEQ ID NOs: 2255 and 2256; SEQ ID NOs: 2257 and 2258; SEQ ID NOs: 2259 and 2260. As a non-limiting example, these C19orf80-saRNA sequences which are saRNA duplexes may be used to modulate betatrophin protein levels, regulating autophagy and lipid metabolism, treating obesity and/or treating type II or type I diabetes.

### F7 Gene

[0500] As another non-limiting example, provided is a method of modulating the expression of F7 gene comprising administering saRNA of the present invention, wherein the saRNA targets an antisense RNA transcript of F7 gene. These saRNAs are called F7-saRNA. In one embodiment, the expression of F7 gene is increased by at least 20, 30, 40%, or at least 45, 50, 55, 60, 65, 70, 75%, or at least 80% in the presence of the F7-saRNA of the present invention compared to the expression of F7 gene in the absence of the F7-saRNA of the present invention. In a further embodiment, the expression of F7 gene is increased by a factor of at least 2, 3, 4, 5, 6, 7, 8, 9, 10, or by a factor of at least 15, 20, 25, 30, 35, 40, 45, 50, or by a factor of at least 60, 70, 80, 90, 100, in the presence of the F7-saRNA of the present invention compared to the expression of F7 gene in the absence of the F7-saRNA of the present invention. The modulation of the expression of F7 gene may be reflected or determined by the change of F7 mRNA levels.

[0501] F7-saRNAs may be single-stranded and comprise 14-30 nucleotides. The sequence of a single-stranded F7-saRNA may have at least 60%, 70%, 80% or 90% identity with a sequence selected from the sequences of the antisense strands in Table 48. In one embodiment, the single-stranded saRNA comprises a sequence selected from the sequences of the antisense strands in Table 48. In one embodiment, the single-stranded F7-saRNA may have a 3′ tail. The sequence of a single-stranded F7-saRNA with a 3′ tail may have at least 60%, 70%, 80% or 90% identity with a sequence selected from the sequences of the antisense strands in Table 49. In one embodiment, the single-stranded saRNA comprises a sequence selected from the sequences of the antisense strands in Table 49.

[0502] F7-saRNAs may be double-stranded. The two strands form a duplex and each strand comprises 14-30 nucleotides. The first strand of a double-stranded F7-saRNA may have at least 60%, 70%, 80% or 90% identity with a sequence selected from the sequences of the antisense strands in Table 48. In one embodiment, the first strand of the double-stranded saRNA comprises a sequence selected from the sequences of the antisense strands in Table 48. The second strand of a double-stranded F7-saRNA may have at least 60%, 70%, 80% or 90% identity with a sequence selected from the sequences of the sense strands in Table 48. In one embodiment, the second strand of the double-stranded saRNA comprises a sequence selected from the sequences of the sense strands in Table 48. In one embodiment, the double-stranded F7-saRNA may have a 3′ overhang on each strand. The first strand of a double-stranded F7-saRNA may have at least 60%, 70%, 80% or 90% identity with a sequence selected from the sequences of the antisense strands in Table 49. In one embodiment, the first strand of the double-stranded saRNA comprises a sequence selected from the sequences of the antisense strands in Table 49. The second strand of a double-stranded F7-saRNA may have at least 60%, 70%, 80% or 90% identity with a sequence selected from the sequences of the sense strands in Table 49. In one embodiment, the second strand of the double-stranded saRNA comprises a sequence selected from the sequences of the sense strands in Table 49.

[0503] F7-saRNAs may be modified or unmodified.

[0504] Table 48-1 describes the target gene, the targeted sequence, the genomic location of the targeted sequence and the relative location of F7-saRNAs with no 3′ overhang. In Table 48-1, the targeted sequence is defined as a region on the template strand of the target gene which is identical to a region on the target antisense RNA transcript to which the antisense strand of an saRNA hybridizes. In Table 48-1, the relative location is the distance from the 5′ end of the targeted sequence to the TSS. A negative number represents a location upstream of the TSS and a positive number represents a location downstream of the TSS.

TABLE 48-1
Sequences of F7-saRNAs (with no 3′overhang)

| saRNA | Target | | Targeted | Genomic Location of | Relative |
|---|---|---|---|---|---|
| ID | Gene | Targeted sequence | sequence ID | the Targeted sequence | Location |
| F7.NM_019616- | F7 | agcaatcatgcgagtcaaa | 1890 | chr13: 113759763 | −319 |
| Pr-3 | human | | | minus strand | |
| F7.NM_019616- | F7 | agtcaaatctcaagactgt | 1891 | chr13: 113759751 | −331 |
| Pr- | human | | | minus strand | |
| 20 | | | | | |
| F7.NM_019616- | F7 | ctgagaagtgccgggaata | 1892 | chr13: 113759628 | −454 |
| Pr- | human | | | minus strand | |
| 21 | | | | | |
| F7.NM_019616- | F7 | gggtgtggatgtaaatatt | 1893 | chr13: 113759727 | −355 |
| Pr- | human | | | minus strand | |
| 23 | | | | | |
| F7.NM_019616- | F7 | caaatacgatctagaattc | 1894 | chr13: 113759840 | −242 |
| Pr- | human | | | minus strand | |
| 27 | | | | | |
| F7.NM_019616- | F7 | tagcaatcatgcgagtcaa | 1895 | chr13: 113759764 | −318 |
| Pr- | human | | | minus strand | |
| 28 | | | | | |
| F7.NM_019616- | F7 | gggttctcagaatgtggaa | 1896 | chr13: 113759116 | −966 |
| Pr- | human | | | minus strand | |
| 30 | | | | | |
| F7.NM_019616- | F7 | atgctggtttctagaagga | 1897 | chr13: 113760365 | 283 |
| Pr- | human | | | minus strand | |
| 38 | | | | | |
| F7.NM_019616- | F7 | agatttaaactgcagatga | 1898 | chr13: 113759795 | −287 |
| Pr- | human | | | minus strand | |
| 39 | | | | | |

TABLE 48-2
Sequences of F7-saRNAs (with no 3′ overhang)

| | | Sense SEQ | | Anti-sense |
|---|---|---|---|---|
| saRNA ID | Sense (passenger) | ID | Antisense (guide) | SEQ ID |
| F7.NM_019616- | AGCAAUCAUGCGAGUC | 1899 | UUUGACUCGCAUG | 1900 |
| Pr-3 | AAA | | AUUGCU | |
| F7.NM_019616- | AGUCAAAUCUCAAGAC | 1901 | ACAGUCUUGAGAU | 1902 |
| Pr-20 | UGU | | UUGACU | |
| F7.NM_019616- | CUGAGAAGUGCCGGG | 1903 | UAUUCCCGGCACUU | 1904 |
| Pr-21 | AAUA | | CUCAG | |
| F7.NM_019616- | GGGUGUGGAUGUAAA | 1905 | AAUAUUUACAUCC | 1906 |
| Pr-23 | UAUU | | ACACCC | |
| F7.NM_019616- | CAAAUACGAUCUAGA | 1907 | GAAUUCUAGAUCG | 1908 |
| Pr-27 | AUUC | | UAUUUG | |
| F7.NM_019616- | UAGCAAUCAUGCGAG | 1909 | UUGACUCGCAUGA | 1910 |
| Pr-28 | UCAA | | UUGCUA | |
| F7.NM_019616- | GGGUUCUCAGAAUGU | 1911 | UUCCACAUUCUGAG | 1912 |
| Pr-30 | GGAA | | AACCC | |
| F7.NM_019616- | AUGCUGGUUUCUAGA | 1913 | UCCUUCUAGAAACC | 1914 |
| Pr-38 | AGGA | | AGCAU | |
| F7.NM_019616- | AGAUUUAAACUGCAG | 1915 | UCAUCUGCAGUUU | 1916 |
| Pr-39 | AUGA | | AAAUCU | |

TABLE 49
Sequences of F7-saRNAs (with 3′ overhang)

| | | Sense | | Antisense |
|---|---|---|---|---|
| saRNA ID | Sense (passenger) | SEQ ID | Antisense (guide) | SEQ ID |
| F7.NM_019616- | AGCAAUCAUGCGAGUCA | 1917 | UUUGACUCGCAUGAU | 1918 |
| Pr-3′ | AAUU | | UGCUUU | |
| F7.NM_019616- | AGUCAAAUCUCAAGACU | 1919 | ACAGUCUUGAGAUUU | 1920 |
| Pr-20′ | GUUU | | GACUUU | |
| F7.NM_019616- | CUGAGAAGUGCCGGGAA | 1921 | UAUUCCCGGCACUUCU | 1922 |
| Pr-21′ | UAUU | | CAGUU | |
| F7.NM_019616- | GGGUGUGGAUGUAAAUA | 1923 | AAUAUUUACAUCCAC | 1924 |
| Pr-23′ | UUUU | | ACCCUU | |
| F7.NM_019616- | CAAAUACGAUCUAGAAU | 1925 | GAAUUCUAGAUCGUA | 1926 |
| Pr-27′ | UCUU | | UUUGUU | |
| F7.NM_019616- | UAGCAAUCAUGCGAGUC | 1927 | UUGACUCGCAUGAUU | 1928 |
| Pr-28′ | AAUU | | GCUAUU | |
| F7.NM_019616- | GGGUUCUCAGAAUGUGG | 1929 | UUCCACAUUCUGAGA | 1930 |
| Pr-30′ | AAUU | | ACCCUU | |
| F7.NM_019616- | AUGCUGGUUUCUAGAAG | 1931 | UCCUUCUAGAAACCA | 1932 |
| Pr-38′ | GAUU | | GCAUUU | |
| F7.NM_019616- | AGAUUUAAACUGCAGAU | 1933 | UCAUCUGCAGUUUAA | 1934 |
| Pr-39′ | GAUU | | AUCUUU | |

[0505] F7 gene encodes coagulation factor VII which is a vitamin K-dependent factor essential for hemostasis. Coagulation factor VII protein is converted to an active form (factor VIIa) by either factor IXa, factor Xa, factor XIIa, or thrombin by minor proteolysis. The activated factor VIIa then further activates the coagulation cascade that forms a blood blot by converting factor IX to factor IXa and/or factor X to factor Xa. Mutations in F7 gene can cause coagulopathy and factor VII deficiency. Factor VII deficiency is characterized by a bleeding phenotype varying from mild to severe (Elmahmoudi et al., Diagn Pathol., vol. 7:92 (2012), the contents of which are incorporated herein by reference in their entirety). It may lead to early occurrence of intracerebral hemorrhage, repeated hemarthroses, cutaneous-mucosal hemorrhages (epistaxis, menorrhagia), or hemorrhages provoked by a surgical intervention.

[0506] In one embodiment, provided is a method of modulating coagulation factor VII protein levels comprising administering F7-saRNA of the present invention, wherein the F7-saRNA targets an antisense RNA transcript of F7 gene. In another embodiment, provided is a method of treating factor VII deficiency comprising administering F7-saRNA of the present invention, wherein the F7-saRNA targets an antisense RNA transcript of F7 gene. In one embodiment, coagulation factor VII protein level is increased by at least 20, 30, 40%, or at least 45, 50, 55, 60, 65, 70, 75%, or at least 80% in the presence of the F7-saRNA of the present invention compared to coagulation factor VII protein level in the absence of the F7-saRNA of the present invention. In a further embodiment, coagulation factor VII protein level is increased by a factor of at least 2, 3, 4, 5, 6, 7, 8, 9, 10, or by a factor of at least 15, 20, 25, 30, 35, 40, 45, 50, or by a factor of at least 60, 70, 80, 90, 100, in the presence of the F7-saRNA of the present invention compared to coagulation factor VII protein level in the absence of the F7-saRNA of the present invention.

[0507] In one embodiment, the F7-saRNA of the present invention is an antisense sequence such as, but not limited to, SEQ ID NO: 1900, 1902, 1904, 1906, 1908, 1910, 1912, 1914, 1916, 1918, 1920, 1922, 1924, 1926, 1928, 1930, 1932, 1934, 3218, 3220, 3222, 3224, 3226, 3228, 3230, 3232, 3234, 3236, 3238, 3240, 3242, 3244, 3246, 3248, 3250, 3252, 3254, 3256, 3258, 3260, 3262, 3264, 3266, 3268, 3270, 3272, 3274, 3276, 3278, 3280, 3282, 3284 and 3286. As a non-limiting example, these F7-saRNA sequences may be used to modulate coagulation factor VII protein levels.

[0508] In one embodiment, the F7-saRNA of the present invention is an saRNA duplex. The saRNA duplex may be a pair of sense and antisense sequences such as, but not limited to, SEQ ID NOs: 1899 and 1900: SEQ ID NOs: 1901 and 1902: SEQ ID NOs: 1903 and 1904: SEQ ID NOs: 1905 and 1906: SEQ ID NOs: 1907 and 1908: SEQ ID NOs: 1909 and 1910: SEQ ID NOs: 1911 and 1912: SEQ ID NOs: 1913 and 1914: SEQ ID NOs: 1915 and 1916: SEQ ID NOs: 1917 and 1918: SEQ ID NOs: 1919 and 1920: SEQ ID NOs: 1921 and 1922: SEQ ID NOs: 1923 and 1924: SEQ ID NOs: 1925 and 1926: SEQ ID NOs: 1927 and 1928: SEQ ID NOs: 1929 and 1930: SEQ ID NOs: 1931 and 1932: SEQ ID NOs: 1933 and 1934: SEQ ID NOs: 3217 and 3218: SEQ ID NOs: 3219 and 3220: SEQ ID NOs: 3221 and 3222: SEQ ID NOs: 3223 and 3224: SEQ ID NOs: 3225 and 3226: SEQ ID NOs: 3227 and 3228: SEQ ID NOs: 3229 and 3230: SEQ ID NOs: 3231 and 3232: SEQ ID NOs: 3233 and 3234: SEQ ID NOs: 3235 and 3236: SEQ ID NOs: 3237 and 3238: SEQ ID NOs: 3239 and 3240: SEQ ID NOs: 3241 and 3242: SEQ ID NOs: 3243 and 3244: SEQ ID NOs: 3245 and 3246: SEQ ID NOs: 3247 and 3248: SEQ ID NOs: 3249 and 3250: SEQ ID NOs: 3251 and 3252: SEQ ID NOs: 3253 and 3254: SEQ ID NOs: 3255 and 3256: SEQ ID NOs: 3257 and 3258: SEQ ID NOs: 3259 and 3260: SEQ ID NOs: 3261 and 3262: SEQ ID NOs: 3263 and 3264: SEQ ID NOs: 3265 and 3266: SEQ ID NOs: 3267 and 3268: SEQ ID NOs: 3269 and 3270: SEQ ID NOs: 3271 and 3272: SEQ ID NOs: 3273 and 3274: SEQ ID NOs: 3275 and 3276: SEQ ID NOs: 3277 and 3278: SEQ ID NOs: 3279 and 3280: SEQ ID NOs: 3281 and 3282: SEQ ID NOs: 3283 and 3284: SEQ ID NOs: 3285 and 3286. As a non-limiting example, these F7-saRNA sequences which are saRNA duplexes may be used to modulate coagulation factor VII protein levels.

### F8 Gene

[0509] As another non-limiting example, provided is a method of modulating the expression of F8 gene comprising administering saRNA of the present invention, wherein the saRNA targets an antisense RNA transcript of F8 gene. These saRNAs are called F8-saRNA. In one embodiment, the expression of F8 gene is increased by at least 20, 30, 40%, or at least 45, 50, 55, 60, 65, 70, 75%, or at least 80% in the presence of the F8-saRNA of the present invention compared to the expression of F8 gene in the absence of the F8-saRNA of the present invention. In a further embodiment, the expression of F8 gene is increased by a factor of at least 2, 3, 4, 5, 6, 7, 8, 9, 10, or by a factor of at least 15, 20, 25, 30, 35, 40, 45, 50, or by a factor of at least 60, 70, 80, 90, 100, in the presence of the F8-saRNA of the present invention compared to the expression of F8 gene in the absence of the F8-saRNA of the present invention. The modulation of the expression of F8 gene may be reflected or determined by the change of F8 mRNA levels.

[0510] F8-saRNAs may be single-stranded and comprise 14-30 nucleotides. The sequence of a single-stranded F8-saRNA may have at least 60%, 70%, 80% or 90% identity with a sequence selected from the sequences of the antisense strands in Table 50-2. In one embodiment, the single-stranded saRNA comprises a sequence selected from the sequences of the antisense strands in Table 50-2. In one embodiment, the single-stranded F8-saRNA may have a 3′ tail. The sequence of a single-stranded F8-saRNA with a 3′ tail may have at least 60%, 70%, 80% or 90% identity with a sequence selected from the sequences of the antisense strands in Table 51. In one embodiment, the single-stranded saRNA comprises a sequence selected from the sequences of the antisense strands in Table 51.

[0511] F8-saRNAs may be double-stranded. The two strands form a duplex and each strand comprises 14-30 nucleotides. The first strand of a double-stranded F8-saRNA may have at least 60%, 70%, 80% or 90% identity with a sequence selected from the sequences of the antisense strands in Table 50-2. In one embodiment, the first strand of the double-stranded saRNA comprises a sequence selected from the sequences of the antisense strands in Table 50-2. The second strand of a double-stranded F8-saRNA may have at least 60%, 70%, 80% or 90% identity with a sequence selected from the sequences of the sense strands in Table 50-2. In one embodiment, the second strand of the double-stranded saRNA comprises a sequence selected from the sequences of the sense strands in Table 50-2. In one embodiment, the double-stranded F8-saRNA may have a 3′ overhang on each strand. The first strand of a double-stranded F8-saRNA may have at least 60%, 70%, 80% or 90% identity with a sequence selected from the sequences of the antisense strands in Table 51. In one embodiment, the first strand of the double-stranded saRNA comprises a sequence selected from the sequences of the antisense strands in Table 51. The second strand of a double-stranded F8-saRNA may have at least 60%, 70%, 80% or 90% identity with a sequence selected from the sequences of the sense strands in Table 51. In one embodiment, the second strand of the double-stranded saRNA comprises a sequence selected from the sequences of the sense strands in Table 51.

[0512] F8-saRNAs may be modified or unmodified.

[0513] Table 50-1 describes the target gene, the targeted sequence, the genomic location of the targeted sequence and the relative location of F8-saRNAs with no 3′ overhang. In Table 50-1, the targeted sequence is defined as a region on the template strand of the target gene which is identical to a region on the target antisense RNA transcript to which the antisense strand of an saRNA hybridizes. In Table 50-1, the relative location is the distance from the 5′ end of the targeted sequence to the TSS. A negative number represents a location upstream of the TSS and a positive number represents a location downstream of the TSS.

TABLE 50-1
Sequences of F8-saRNAs (with no 3′ overhang)

| | | | | Genomic Location | |
|---|---|---|---|---|---|
| | | | Targeted | of the Targeted | Relative |
| saRNA ID | Target Gene | Targeted sequence | sequence ID | sequence | Location |
| F8.NM_000132- | F8 human | ggcataagtctgctttaat | 1935 | chrX: 154251110 | −112 |
| Pr-1 | | | | plus strand | |
| F8.NM_000132- | F8 human | acaggagactcttacataa | 1936 | chrX: 154250003 | 995 |
| Pr-2 | | | | plus strand | |
| F8.NM_000132- | F8 human | ccgagatcactttgcatat | 1937 | chrX: 154250705 | 293 |
| Pr-4 | | | | plus strand | |
| F8.NM_000132- | F8 human | tagattgctttctatgaaa | 1938 | chrX: 154250056 | 942 |
| Pr-5 | | | | plus strand | |
| F8.NM_000132- | F8 human | gggcataagtctgctttaa | 1939 | chrX: 154251109 | −111 |
| Pr-7 | | | | plus strand | |
| F8.NM_000132- | F8 human | cgagatcactttgcatata | 1940 | chrX: 154250706 | 292 |
| Pr-12 | | | | plus strand | |
| F8.NM_000132- | F8 human | tgtcgaagattctagaatt | 1941 | chrX: 154251258 | −260 |
| Pr-13 | | | | plus strand | |
| F8.NM_000132- | F8 human | agcatttctgctaataaca | 1942 | chrX: 154250517 | 481 |
| Pr-31 | | | | plus strand | |
| F8.NM_000132- | F8 human | tggagagctctatttgcat | 1943 | chrX: 154250808 | 190 |
| Pr-32 | | | | plus strand | |
| F8.NM_000132- | F8 human | ggatatatctctttacatc | 1944 | chrX: 154251961 | −963 |
| Pr-35 | | | | plus strand | |
| F8.NM_000132- | F8 human | gctctatttgcatgactta | 1945 | chrX: 154250814 | 184 |
| Pr-40 | | | | plus strand | |
| F8.NM_019863- | F8 human | Gggacaacagtctagaaat | 1946 | chrX: 154114250 | 327 |
| Pr-2 | | | | plus strand | |
| F8.NM_019863- | F8 human | acgagtttcgtttgggtca | 1947 | chrX: 154114291 | 286 |
| Pr-14 | | | | plus strand | |
| F8.NM_019863- | F8 human | tctagaaatgcgcagacat | 1948 | chrX: 154114260 | 317 |
| Pr-23 | | | | plus strand | |
| F8.NM_019863- | F8 human | tcacgagtttcgtttgggt | 1949 | chrX: 154114289 | 288 |
| Pr-24 | | | | plus strand | |
| F8.NM_019863- | F8 human | cgagtttcgtttgggtcat | 1950 | chrX: 154114292 | 285 |
| Pr-29 | | | | plus strand | |
| F8.NM_019863- | F8 human | ctagaaatgcgcagacatg | 1951 | chrX: 154114261 | 316 |
| Pr-33 | | | | plus strand | |

TABLE 50-2
Sequences of F8-saRNAs (with no 3′ overhang)

| | | | | Anti-sense |
|---|---|---|---|---|
| saRNA ID | Sense (passenger) | Sense SEQ ID | Antisense (guide) | SEQ ID |
| F8.NM_000132-Pr-1 | GGCAUAAGUCUG | 1952 | AUUAAAGCAGAC | 1953 |
| | CUUUAAU | | UUAUGCC | |
| F8.NM_000132-Pr-2 | ACAGGAGACUCU | 1954 | UUAUGUAAGAG | 1955 |
| | UACAUAA | | UCUCCUGU | |
| F8.NM_000132-Pr-4 | CCGAGAUCACUU | 1956 | AUAUGCAAAGU | 1957 |
| | UGCAUAU | | GAUCUCGG | |
| F8.NM_000132-Pr-5 | UAGAUUGCUUUC | 1958 | UUUCAUAGAAA | 1959 |
| | UAUGAAA | | GCAAUCUA | |
| F8.NM_000132-Pr-7 | GGGCAUAAGUCU | 1960 | UUAAAGCAGACU | 1961 |
| | GCUUUAA | | UAUGCCC | |
| F8.NM_000132-Pr-12 | CGAGAUCACUUU | 1962 | UAUAUGCAAAG | 1963 |
| | GCAUAUA | | UGAUCUCG | |
| F8.NM_000132-Pr-13 | UGUCGAAGAUUC | 1964 | AAUUCUAGAAUC | 1965 |
| | UAGAAUU | | UUCGACA | |
| F8.NM_000132-Pr-31 | AGCAUUUCUGCU | 1966 | UGUUAUUAGCA | 1967 |
| | AAUAACA | | GAAAUGCU | |
| F8.NM_000132-Pr-32 | UGGAGAGCUCUA | 1968 | AUGCAAAUAGA | 1969 |
| | UUUGCAU | | GCUCUCCA | |
| F8.NM_000132-Pr-35 | GGAUAUAUCUCU | 1970 | GAUGUAAAGAG | 1971 |
| | UUACAUC | | AUAUAUCC | |
| F8.NM_000132-Pr-40 | GCUCUAUUUGCA | 1972 | UAAGUCAUGCAA | 1973 |
| | UGACUUA | | AUAGAGC | |
| F8.NM_019863-Pr-2 | GGGACAACAGUC | 1974 | AUUUCUAGACUG | 1975 |
| | UAGAAAU | | UUGUCCC | |
| F8.NM_019863-Pr-14 | ACGAGUUUCGUU | 1976 | UGACCCAAACGA | 1977 |
| | UGGGUCA | | AACUCGU | |
| F8.NM_019863-Pr-23 | UCUAGAAAUGCG | 1978 | AUGUCUGCGCAU | 1979 |
| | CAGACAU | | UUCUAGA | |
| F8.NM_019863-Pr-24 | UCACGAGUUUCG | 1980 | ACCCAAACGAAA | 1981 |
| | UUUGGGU | | CUCGUGA | |
| F8.NM_019863-Pr-29 | CGAGUUUCGUUU | 1982 | AUGACCCAAACG | 1983 |
| | GGGUCAU | | AAACUCG | |
| F8.NM_019863-Pr-33 | CUAGAAAUGCGC | 1984 | CAUGUCUGCGCA | 1985 |
| | AGACAUG | | UUUCUAG | |

TABLE 51
Sequences of F8-saRNAs (with 3′ overhang)

| | | | | Antisense |
|---|---|---|---|---|
| saRNA ID | Sense (passenger) | Sense SEQ ID | Antisense (guide) | SEQ ID |
| F8.NM_000132-Pr-1′ | GGCAUAAGUCUG | 1986 | AUUAAAGCAGAC | 1987 |
| | CUUUAAUUU | | UUAUGCCUU | |
| F8.NM_000132-Pr-2′ | ACAGGAGACUCU | 1988 | UUAUGUAAGAG | 1989 |
| | UACAUAAUU | | UCUCCUGUUU | |
| F8.NM_000132-Pr-4′ | CCGAGAUCACUU | 1990 | AUAUGCAAAGU | 1991 |
| | UGCAUAUUU | | GAUCUCGGUU | |
| F8.NM_000132-Pr-5′ | UAGAUUGCUUUC | 1992 | UUUCAUAGAAA | 1993 |
| | UAUGAAAUU | | GCAAUCUAUU | |
| F8.NM_000132-Pr-7′ | GGGCAUAAGUCU | 1994 | UUAAAGCAGACU | 1995 |
| | GCUUUAAUU | | UAUGCCCUU | |
| F8.NM_000132-Pr-12′ | CGAGAUCACUUU | 1996 | UAUAUGCAAAG | 1997 |
| | GCAUAUAUU | | UGAUCUCGUU | |
| F8.NM_000132-Pr-13′ | UGUCGAAGAUUC | 1998 | AAUUCUAGAAUC | 1999 |
| | UAGAAUUUU | | UUCGACAUU | |
| F8.NM_000132-Pr-31′ | AGCAUUUCUGCU | 2000 | UGUUAUUAGCA | 2001 |
| | AAUAACAUU | | GAAAUGCUUU | |
| F8.NM_000132-Pr-32′ | UGGAGAGCUCUA | 2002 | AUGCAAAUAGA | 2003 |
| | UUUGCAUUU | | GCUCUCCAUU | |
| F8.NM_000132-Pr-35′ | GGAUAUAUCUCU | 2004 | GAUGUAAAGAG | 2005 |
| | UUACAUCUU | | AUAUAUCCUU | |
| F8.NM_000132-Pr-40′ | GCUCUAUUUGCA | 2006 | UAAGUCAUGCAA | 2007 |
| | UGACUUAUU | | AUAGAGCUU | |
| F8.NM_019863-Pr-2′ | GGGACAACAGUC | 2008 | AUUUCUAGACUG | 2009 |
| | UAGAAAUUU | | UUGUCCCUU | |
| F8.NM_019863-Pr-14′ | ACGAGUUUCGUU | 2010 | UGACCCAAACGA | 2011 |
| | UGGGUCAUU | | AACUCGUUU | |
| F8.NM_019863-Pr-23′ | UCUAGAAAUGCG | 2012 | AUGUCUGCGCAU | 2013 |
| | CAGACAUUU | | UUCUAGAUU | |
| F8.NM_019863-Pr-24′ | UCACGAGUUUCG | 2014 | ACCCAAACGAAA | 2015 |
| | UUUGGGUUU | | CUCGUGAUU | |
| F8.NM_019863-Pr-29′ | CGAGUUUCGUUU | 2016 | AUGACCCAAACG | 2017 |
| | GGGUCAUUU | | AAACUCGUU | |
| F8.NM_019863-Pr-33′ | CUAGAAAUGCGC | 2018 | CAUGUCUGCGCA | 2019 |
| | AGACAUGUU | | UUUCUAGUU | |

[0514] F8 gene encodes coagulation factor VIII, which circulates in the bloodstream in an inactive form, bound to another molecule called von Willebrand factor. When an injury of blood vessels occurs, factor VIII is activated to factor VIIIa and separates from von Willebrand factor to participate in the coagulation cascade that forms a blood clot. Mutations of F8 gene cause hemophilia A, a bleeding disorder, because factor VIII protein level is reduced or the function of factor VIII protein is lost (Seo et al., Blood Res., vol. 48(3):206 (2013), the contents of which are incorporated herein by reference in their entirety).

[0515] In one embodiment, provided is a method of modulating coagulation factor VIII protein levels comprising administering F8-saRNA of the present invention, wherein the F8-saRNA targets an antisense RNA transcript of F8 gene. In another embodiment, provided is a method of treating hemophilia A comprising administering F8-saRNA of the present invention, wherein the F8-saRNA targets an antisense RNA transcript of F8 gene. In one embodiment, coagulation factor VIII protein level is increased by at least 20, 30, 40%, or at least 45, 50, 55, 60, 65, 70, 75%, or at least 80% in the presence of the F8-saRNA of the present invention compared to coagulation factor VIII protein level in the absence of the F8-saRNA of the present invention. In a further embodiment, coagulation factor VIII protein level is increased by a factor of at least 2, 3, 4, 5, 6, 7, 8, 9, 10, or by a factor of at least 15, 20, 25, 30, 35, 40, 45, 50, or by a factor of at least 60, 70, 80, 90, 100, in the presence of the F8-saRNA of the present invention compared to coagulation factor VIII protein level in the absence of the F8-saRNA of the present invention.

[0516] In one embodiment, the F8-saRNA of the present invention is an antisense sequence such as, but not limited to, SEQ ID NO: 1953, 1955, 1957, 1959, 1961, 1963, 1965, 1967, 1969, 1971, 1973, 1975, 1977, 1979, 1981, 1983, 1985, 1987, 1989, 1991, 1993, 1995, 1997, 1999, 2001, 2003, 2005, 2007, 2009, 2011, 2013, 2015, 2017, 2019, 3288, 3290, 3292, 3294, 3296, 3298, 3300, 3302, 3304, 3306, 3308, 3310, 3312, 3314, 3316, 3318, 3320, 3322, 3324, 3326, 3328, 3330, 3332, 3334, 3336, 3338, 3340, 3342, 3344, 3346, 3348, 3350, 3352, 3354, 3356, 3358, 3360, 3362, 3364, 3366, 3368, 3370, 3372, 3374, 3376, 3378, 3380, 3382, 3384, 3386, 3388, 3390, 3392, 3394 and 3396. As a non-limiting example, these F8-saRNA sequences may be used to modulate coagulation factor VIII protein levels and/or treat hemophilia A.

[0517] In one embodiment, the F8-saRNA of the present invention is an saRNA duplex. The saRNA duplex may be a pair of sense and antisense sequences such as, but not limited to, SEQ ID NOs: 1952 and 1953; SEQ ID NOs: 1954 and 1955; SEQ ID NOs: 1956 and 1957; SEQ ID NOs: 1958 and 1959; SEQ ID NOs: 1960 and 1961; SEQ ID NOs: 1962 and 1963; SEQ ID NOs: 1964 and 1965; SEQ ID NOs: 1966 and 1967; SEQ ID NOs: 1968 and 1969; SEQ ID NOs: 1970 and 1971; SEQ ID NOs: 1972 and 1973; SEQ ID NOs: 1974 and 1975; SEQ ID NOs: 1976 and 1977; SEQ ID NOs: 1978 and 1979; SEQ ID NOs: 1980 and 1981; SEQ ID NOs: 1982 and 1983; SEQ ID NOs: 1984 and 1985; SEQ ID NOs: 1986 and 1987; SEQ ID NOs: 1988 and 1989; SEQ ID NOs: 1990 and 1991; SEQ ID NOs: 1992 and 1993; SEQ ID NOs: 1994 and 1995; SEQ ID NOs: 1996 and 1997; SEQ ID NOs: 1998 and 1999; SEQ ID NOs: 2000 and 2001; SEQ ID NOs: 2002 and 2003; SEQ ID NOs: 2004 and 2005; SEQ ID NOs: 2006 and 2007; SEQ ID NOs: 2008 and 2009; SEQ ID NOs: 2010 and 2011; SEQ ID NOs: 2012 and 2013; SEQ ID NOs: 2014 and 2015; SEQ ID NOs: 2016 and 2017; SEQ ID NOs: 2018 and 2019; SEQ ID NOs: 3287 and 3288; SEQ ID NOs: 3289 and 3290; SEQ ID NOs: 3291 and 3292; SEQ ID NOs: 3293 and 3294; SEQ ID NOs: 3295 and 3296; SEQ ID NOs: 3297 and 3298; SEQ ID NOs: 3299 and 3300; SEQ ID NOs: 3301 and 3302; SEQ ID NOs: 3303 and 3304; SEQ ID NOs: 3305 and 3306; SEQ ID NOs: 3307 and 3308; SEQ ID NOs: 3309 and 3310; SEQ ID NOs: 3311 and 3312; SEQ ID NOs: 3313 and 3314; SEQ ID NOs: 3315 and 3316; SEQ ID NOs: 3317 and 3318; SEQ ID NOs: 3319 and 3320; SEQ ID NOs: 3321 and 3322; SEQ ID NOs: 3323 and 3324; SEQ ID NOs: 3325 and 3326; SEQ ID NOs: 3327 and 3328; SEQ ID NOs: 3329 and 3330; SEQ ID NOs: 3331 and 3332; SEQ ID NOs: 3333 and 3334; SEQ ID NOs: 3335 and 3336; SEQ ID NOs: 3337 and 3338; SEQ ID NOs: 3339 and 3340; SEQ ID NOs: 3341 and 3342; SEQ ID NOs: 3343 and 3344; SEQ ID NOs: 3345 and 3346; SEQ ID NOs: 3347 and 3348; SEQ ID NOs: 3349 and 3350; SEQ ID NOs: 3351 and 3352; SEQ ID NOs: 3353 and 3354; SEQ ID NOs: 3355 and 3356; SEQ ID NOs: 3357 and 3358; SEQ ID NOs: 3359 and 3360; SEQ ID NOs: 3361 and 3362; SEQ ID NOs: 3363 and 3364; SEQ ID NOs: 3365 and 3366; SEQ ID NOs: 3367 and 3368; SEQ ID NOs: 3369 and 3370; SEQ ID NOs: 3371 and 3372; SEQ ID NOs: 3373 and 3374; SEQ ID NOs: 3375 and 3376; SEQ ID NOs: 3377 and 3378; SEQ ID NOs: 3379 and 3380; SEQ ID NOs: 3381 and 3382; SEQ ID NOs: 3383 and 3384; SEQ ID NOs: 3385 and 3386; SEQ ID NOs: 3387 and 3388; SEQ ID NOs: 3389 and 3390; SEQ ID NOs: 3391 and 3392; SEQ ID NOs: 3393 and 3394; SEQ ID NOs: 3395 and 3396. As a non-limiting example, these F8-saRNA sequences which are saRNA duplexes may be used to modulate coagulation factor VIII protein levels and/or treat hemophilia A. Additional saRNA sequences

[0518] Additional saRNAs are designed from the method disclosed in the present application. In some embodiments, the saRNAs are single-stranded. They are identified in the Sequence Listing as antisense. The reverse complement of the antisense saRNA strand (identified in the Sequence Listing as sense) has sequence identity with a target site or targeted sequence on the template strand of a target gene. The location of the target site is identified by its relative location to the TSS on the template strand (a subportion of which comprises the TSS core sequence). In some embodiments, the single-stranded saRNA may have a 3′ tail. The single-stranded saRNA molecule binds to the target antisense RNA transcript in the nucleus.

[0519] In some embodiments, the saRNAs are double-stranded. Each saRNA molecule comprises an antisense strand and a sense strand. Each strand is identified in the Sequence Listing as antisense or sense. In some embodiments, each strand may have a 3′ tail.

[0520] The sequences of the saRNAs (SEQ ID Nos 2061-9946) and the sequences of the TSS cores (SEQ ID Nos 2020-2060) are provided in the Sequence Listing. The nature of the sequence, antisense or sense, is identified in the description field of the Sequence Listing for each saRNA sequence. The antisense saRNA may be administered as a single-stranded saRNA. The antisense saRNA may also form a double-stranded saRNA duplex with its sense saRNA and the double-stranded saRNA is administered. The SEQ ID No. of the sense, i.e., reverse complement, of the antisense saRNA is identified in the description field. The sense saRNA has sequence identity with a target site within the TSS core sequence. The SEQ ID No. of the TSS core and the start position of the target site within the TSS core is identified in the description field of the sense saRNA. Each TSS core is mapped to, or derived from, a target transcript. Therefore, the target transcript of the sense saRNA and the antisense saRNA can each be identified by the TSS core SEQ ID No. in the description field of the sense saRNA.

[0521] The target genes, target transcript RefSeq ID numbers, the protein encoded by the target transcript, and the TSS locations of the target genes are disclosed in Table 52.

TABLE 52
Target genes of additional saRNAs

| | | Protein | | | |
|---|---|---|---|---|---|
| | Target | encoded by | Nature of | Location on the coding strand | SEQ ID |
| Target | transcript | target | target | that corresponds to the target | of TSS |
| Gene | RefSeq No. | transcript | transcript | transcript's TSS | core |
| APOA1 | NM_000039 | NP_000030 | Coding | chr11: 116837622 minus strand | 2020 |
| C19orf80 | NM_018687 | NP_061157 | Coding | chr19: 11239618 plus strand | 2021 |
| CDKN1B | NM_004064 | NP_004055 | Coding | chr12: 12717269 plus strand | 2022 |
| DMD | NM_000109 | NP_000100 | Coding | chrX: 33339609 minus strand | 2023 |
| DMD | NM_004006 | NP_003997 | Coding | chrX: 33211556 minus strand | 2024 |
| DMD | NM_004009 | NP_004000 | Coding | chrX: 33128428 minus strand | 2025 |
| DMD | NM_004010 | NP_004001 | Coding | chrX: 33128427 minus strand | 2026 |
| DMD | NM_004011 | NP_004002 | Coding | chrX: 32412254 minus strand | 2027 |
| DMD | NM_004012 | NP_004003 | Coding | chrX: 32412254 minus strand | 2027 |
| DMD | NM_004013 | NP_004004 | Coding | chrX: 32155469 minus strand | 2028 |
| DMD | NM_004014 | NP_004005 | Coding | chrX: 31508298 minus strand | 2029 |
| DMD | NM_004015 | NP_004006 | Coding | chrX: 31266907 minus strand | 2030 |
| DMD | NM_004016 | NP_004007 | Coding | chrX: 31266907 minus strand | 2030 |
| DMD | NM_004017 | NP_004008 | Coding | chrX: 31266907 minus strand | 2030 |
| DMD | NM_004018 | NP_004009 | Coding | chrX: 31266907 minus strand | 2030 |
| DMD | NM_004019 | NP_004010 | Coding | chrX: 31508298 minus strand | 2030 |
| DMD | NM_004020 | NP_004011 | Coding | chrX: 32412254 minus strand | 2028 |
| DMD | NM_004021 | NP_004012 | Coding | chrX: 32412254 minus strand | 2028 |
| DMD | NM_004022 | NP_004013 | Coding | chrX: 32155469 minus strand | 2028 |
| DMD | NM_004023 | NP_004014 | Coding | chrX: 31508298 minus strand | 2028 |
| EPO | NM_000799 | NP_000790 | Coding | chr7: 100720799 plus strand | 2031 |
| F7 | NM_000131 | NP_000122 | Coding | chr13: 113105787 plus strand | 2032 |
| F7 | NM_001267554 | NP_001254483 | Coding | chr13: 113105787 plus strand | 2032 |
| F7 | NM_019616 | NP_062562 | Coding | chr13: 113105787 plus strand | 2032 |
| F8 | NM_000132 | NP_000123 | Coding | chrX: 155022723 minus strand | 2033 |
| F8 | NM_019863 | NP_063916 | Coding | chrX: 154886302 minus strand | 2034 |
| FNDC5 | NM_001171940 | NP_001165411 | Coding | chr1: 32870813 minus strand | 2035 |
| FNDC5 | NM_001171941 | NP_001165412 | Coding | chr1: 32872492 minus strand | 2036 |
| FNDC5 | NM_153756 | NP_715637 | Coding | chr1: 32870813 minus strand | 2035 |
| FOXA2 | NM_021784 | NP_068556 | Coding | chr20: 22585463 minus strand | 2037 |
| FOXA2 | NM_153675 | NP_710141 | Coding | chr20: 22584463 minus strand | 2038 |
| FOXP3 | NM_001114377 | NP_001107849 | Coding | chrX: 49264826 minus strand | 2039 |
| FOXP3 | NM_014009 | NP_054728 | Coding | chrX: 49264826 minus strand | 2039 |
| HNF4A | NM_000457 | NP_000448 | Coding | chr20: 44401255 plus strand | 2040 |
| HNF4A | NM_001030003 | NP_001025174 | Coding | chr20: 44355800 plus strand | 2041 |
| HNF4A | NM_001030004 | NP_001025175 | Coding | chr20: 44355800 plus strand | 2041 |
| HNF4A | NM_001258355 | NP_001245284 | Coding | chr20: 44401255 plus strand | 2040 |
| HNF4A | NM_001287182 | NP_001274111 | Coding | chr20: 44355800 plus strand | 2041 |
| HNF4A | NM_001287183 | NP_001274112 | Coding | chr20: 44355800 plus strand | 2041 |
| HNF4A | NM_001287184 | NP_001274113 | Coding | chr20: 22585463 minus strand | 2041 |
| HNF4A | NM_175914 | NP_787110 | Coding | chr20: 44355800 plus strand | 2041 |
| HNF4A | NM_178849 | NP_849180 | Coding | chr20: 44401255 plus strand | 2040 |
| HNF4A | NM_178850 | NP_849181 | Coding | chr20: 44401255 plus strand | 2040 |
| IDUA | NM_000203 | NP_000194 | Coding | chr4: 986996 plus strand | 2042 |
| IFNG | NM_000619 | NP_000610 | Coding | chr12: 68159741 minus strand | 2043 |
| IL10 | NM_000572 | NP_000563 | Coding | chr1: 206772494 minus strand | 2044 |
| IL19 | NM_013371 | NP_037503 | Coding | chr1: 206828876 plus strand | 2045 |
| IL19 | NM_153758 | NP_715639 | Coding | chr1: 206798869 plus strand | 2046 |
| IL2 | NM_000586 | NP_000577 | Coding | chr4: 122456495 minus strand | 2047 |
| LDLR | NM_000527 | NP_000518 | Coding | chr19: 11089361 plus strand | 2048 |
| LDLR | NM_001195798 | NP_001182727 | Coding | chr19: 11089361 plus strand | 2048 |
| LDLR | NM_001195799 | NP_001182728 | Coding | chr19: 11089361 plus strand | 2048 |
| LDLR | NM_001195800 | NP_001182729 | Coding | chr19: 11089361 plus strand | 2048 |
| LDLR | NM_001195803 | NP_001182732 | Coding | chr19: 11089361 plus strand | 2048 |
| LMX1A | NM_001174069 | NP_001167540 | Coding | chr1: 165356241 minus strand | 2049 |
| LMX1A | NM_177398 | NP_796372 | Coding | chr1: 165356241 minus strand | 2050 |
| MDM2 | NM_001145337 | NP_001138809 | Coding | chr12: 68809016 plus strand | 2051 |
| MDM2 | NM_001145339 | NP_001138811 | Coding | chr12: 68808171 plus strand | 2052 |
| MDM2 | NM_001145340 | NP_001138812 | Coding | chr12: 68809016 plus strand | 2051 |
| MDM2 | NM_001278462 | NP_001265391 | Coding | chr12: 68809016 plus strand | 2051 |
| MDM2 | NM_002392 | NP_002383 | Coding | chr12: 68808171 plus strand | 2052 |
| METRNL | NM_001004431 | NP_001004431 | Coding | chr17: 83079690 plus strand | 2053 |
| NR4A2 | NM_006186 | NP_006177 | Coding | chr2: 156332775 minus strand | 2054 |
| PAX5 | NM_001280547 | NP_001267476 | Coding | chr9: 37034479 minus strand | 2055 |
| PAX5 | NM_001280548 | NP_001267477 | Coding | chr9: 37034479 minus strand | 2055 |
| PAX5 | NM_001280549 | NP_001267478 | Coding | chr9: 37034479 minus strand | 2055 |
| PAX5 | NM_001280550 | NP_001267479 | Coding | chr9: 37034479 minus strand | 2055 |
| PAX5 | NM_001280551 | NP_001267480 | Coding | chr9: 37034479 minus strand | 2055 |
| PAX5 | NM_001280552 | NP_001267481 | Coding | chr9: 37034479 minus strand | 2055 |
| PAX5 | NM_001280553 | NP_001267482 | Coding | chr9: 37034479 minus strand | 2055 |
| PAX5 | NM_001280554 | NP_001267483 | Coding | chr9: 37034479 minus strand | 2055 |
| PAX5 | NM_001280555 | NP_001267484 | Coding | chr9: 37034479 minus strand | 2055 |
| PAX5 | NM_001280556 | NP_001267485 | Coding | chr9: 37034479 minus strand | 2055 |
| PAX5 | NM_016734 | NP_057953 | Coding | chr9: 37034479 minus strand | 2055 |
| SCN1A | NM_001165963 | NP_001159435 | Coding | chr2: 166073639 minus strand | 2056 |
| SCN1A | NM_001165964 | NP_001159436 | Coding | chr2: 166073639 minus strand | 2056 |
| SCN1A | NM_001202435 | NP_001189364 | Coding | chr2: 166149132 minus strand | 2057 |
| SCN1A | NM_006920 | NP_008851 | Coding | chr2: 166073639 minus strand | 2056 |
| SIRT1 | NM_001142498 | NP_001135970 | Coding | chr10: 67885180 plus strand | 2058 |
| SIRT1 | NM_012238 | NP_036370 | Coding | chr10: 67884668 plus strand | 2059 |
| TH | NM_000360 | NP_000351 | Coding | chr11: 2171805 minus strand | 2060 |
| TH | NM_199292 | NP_954986 | Coding | chr11: 2171805 minus strand | 2060 |
| TH | NM_199293 | NP_954987 | Coding | chr11: 2171805 minus strand | 2060 |

### IV. Kits and Devices

### Kits

[0522] The invention provides a variety of kits for conveniently and/or effectively carrying out methods of the present invention. Typically kits will comprise sufficient amounts and/or numbers of components to allow a user to perform multiple treatments of a subject(s) and/or to perform multiple experiments.

[0523] In one embodiment, the present invention provides kits for regulate the expression of genes in vitro or in vivo, comprising saRNA of the present invention or a combination of saRNA of the present invention, saRNA modulating other genes, siRNAs, miRNAs or other oligonucleotide molecules.

[0524] The kit may further comprise packaging and instructions and/or a delivery agent to form a formulation composition. The delivery agent may comprise a saline, a buffered solution, a lipidoid, a dendrimer or any delivery agent disclosed herein.

[0525] Non-limiting examples of genes include apolipoprotein A1 (APOA1), low density lipoprotein (LDLR), dystrophin (DMD), paired box 5 (PAX5), sodium channel voltage-gated type I alpha subunit (SCN1A), iduronidase alpha-L (IDUA), fibronectin type III domain containing 5 (FNDC5), forkhead box A2 (FOXA2), forkhead box P3 (FOXP3), hepatocyte nuclear factor 4, alpha (HNF4A), interferon, gamma (IFNG), interleukin 10 (IL10), interleukin 2 (IL2), LIM homeobox transcription factor I, alpha (LMXIA), meteorin, glial cell differentiation regulator-like (METRNL), nuclear receptor subfamily 4, group A, member 2 (NR4A2), sirtuin I (SIRTI), tyrosine hydroxylase (TH), erythropoietin (EPO), cyclin-dependent kinase inhibitor I B (p27, Kip I) (CDKNIB), MDM2 oncogene, E3 ubiquitin protein ligase (MDM2), interleukin 19 (IL19), chromosome 19 open reading frame 80 (C19orf90), coagulation factor VII (F7), coagulation factor VIII (F8), C/EBPα, other members of C/EBP family, albumin gene, alphafectoprotein gene, liver specific factor genes, growth factors, nuclear factor genes, tumor suppressing genes, and pluripotency factor genes.

[0526] In one non-limiting example, the buffer solution may include sodium chloride, calcium chloride, phosphate and/or EDTA. In another non-limiting example, the buffer solution may include, but is not limited to, saline, saline with 2 mM calcium, 5% sucrose, 5% sucrose with 2 mM calcium, 5% Mannitol, 5% Mannitol with 2 mM calcium, Ringer's lactate, sodium chloride, sodium chloride with 2 mM calcium and mannose (See U.S. Pub. No. 20120258046; herein incorporated by reference in its entirety). In yet another non-limiting example, the buffer solutions may be precipitated or it may be lyophilized. The amount of each component may be varied to enable consistent, reproducible higher concentration saline or simple buffer formulations. The components may also be varied in order to increase the stability of saRNA in the buffer solution over a period of time and/or under a variety of conditions.

### Devices

[0527] The present invention provides for devices which may incorporate saRNA of the present invention. These devices contain in a stable formulation available to be immediately delivered to a subject in need thereof, such as a human patient.

[0528] Non-limiting examples of such a subject include a subject with high LDL cholesterol, type I or type II diabetes, obesity, metabolic disorders, hyperproliferative disorders, or neurological disorders.

[0529] Non-limiting examples of the devices include a pump, a catheter, a needle, a transdermal patch, a pressurized olfactory delivery device, iontophoresis devices, multi-layered microfluidic devices. The devices may be employed to deliver saRNA of the present invention according to single, multi- or split-dosing regiments. The devices may be employed to deliver saRNA of the present invention across biological tissue, intradermal, subcutaneously, or intramuscularly. More examples of devices suitable for delivering oligonucleotides are disclosed in International Publication WO 2013/090648 filed Dec. 14, 2012, the contents of which are incorporated herein by reference in their entirety.

### DEFINITIONS

[0530] For convenience, the meaning of certain terms and phrases used in the specification, examples, and appended claims, are provided below. If there is an apparent discrepancy between the usage of a term in other parts of this specification and its definition provided in this section, the definition in this section shall prevail.

[0531] About: As used herein, the term “about” means+/−10% of the recited value.

[0532] Administered in combination: As used herein, the term “administered in combination” or “combined administration” means that two or more agents are administered to a subject at the same time or within an interval such that there may be an overlap of an effect of each agent on the patient. In some embodiments, they are administered within about 60, 30, 15, 10, 5, or 1 minute of one another. In some embodiments, the administrations of the agents are spaced sufficiently close together such that a combinatorial (e.g., a synergistic) effect is achieved.

[0533] Amino acid: As used herein, the terms “amino acid” and “amino acids” refer to all naturally occurring L-alpha-amino acids. The amino acids are identified by either the one-letter or three-letter designations as follows: aspartic acid (Asp:D), isoleucine (Ile:I), threonine (Thr:T), leucine (Leu:L), serine (Ser:S), tyrosine (Tyr:Y), glutamic acid (Glu:E), phenylalanine (Phe:F), proline (Pro:P), histidine (His:H), glycine (Gly:G), lysine (Lys:K), alanine (Ala:A), arginine (Arg:R), cysteine (Cys:C), tryptophan (Trp:W), valine (Val:V), glutamine (Gln:Q) methionine (Met:M), asparagines (Asn:N), where the amino acid is listed first followed parenthetically by the three and one letter codes, respectively.

[0534] Animal: As used herein, the term “animal” refers to any member of the animal kingdom. In some embodiments, “animal” refers to humans at any stage of development. In some embodiments, “animal” refers to non-human animals at any stage of development. In certain embodiments, the non-human animal is a mammal (e.g., a rodent, a mouse, a rat, a rabbit, a monkey, a dog, a cat, a sheep, cattle, a primate, or a pig). In some embodiments, animals include, but are not limited to, mammals, birds, reptiles, amphibians, fish, and worms. In some embodiments, the animal is a transgenic animal, genetically-engineered animal, or a clone.

[0535] Approximately: As used herein, the term “approximately” or “about,” as applied to one or more values of interest, refers to a value that is similar to a stated reference value. In certain embodiments, the term “approximately” or “about” refers to a range of values that fall within 25%, 20%, 19%, 18%, 17%, 16%, 15%, 14%, 13%, 12%, 11%, 10%, 9%, 8%, 7%, 6%, 5%, 4%, 3%, 2%, 1%, or less in either direction (greater than or less than) of the stated reference value unless otherwise stated or otherwise evident from the context (except where such number would exceed 100% of a possible value).

[0536] Associated with: As used herein, the terms “associated with,” “conjugated,” “linked,” “attached,” and “tethered,” when used with respect to two or more moieties, means that the moieties are physically associated or connected with one another, either directly or via one or more additional moieties that serves as a linking agent, to form a structure that is sufficiently stable so that the moieties remain physically associated under the conditions in which the structure is used, e.g., physiological conditions. An “association” need not be strictly through direct covalent chemical bonding. It may also suggest ionic or hydrogen bonding or a hybridization based connectivity sufficiently stable such that the “associated” entities remain physically associated.

[0537] Bifunction or Bifunctional: As used herein, the terms “bifunction” and “bifunctional” refers to any substance, molecule or moiety which is capable of or maintains at least two functions. The functions may affect the same outcome or a different outcome. The structure that produces the function may be the same or different. For example, bifunctional saRNA of the present invention may comprise a cytotoxic peptide (a first function) while those nucleosides which comprise the saRNA are, in and of themselves, cytotoxic (second function).

[0538] Biocompatible: As used herein, the term “biocompatible” means compatible with living cells, tissues, organs or systems posing little to no risk of injury, toxicity or rejection by the immune system.

[0539] Biodegradable: As used herein, the term “biodegradable” means capable of being broken down into innocuous products by the action of living things.

[0540] Biologically active: As used herein, the phrase “biologically active” refers to a characteristic of any substance that has activity in a biological system and/or organism. For instance, a substance that, when administered to an organism, has a biological effect on that organism, is considered to be biologically active. In particular embodiments, the saRNA of the present invention may be considered biologically active if even a portion of the saRNA is biologically active or mimics an activity considered biologically relevant.

[0541] Cancer: As used herein, the term “cancer” in an individual refers to the presence of cells possessing characteristics typical of cancer-causing cells, such as uncontrolled proliferation, immortality, metastatic potential, rapid growth and proliferation rate, and certain characteristic morphological features. Often, cancer cells will be in the form of a tumor, but such cells may exist alone within an individual, or may circulate in the blood stream as independent cells, such as leukemic cells.

[0542] Cell growth: As used herein, the term “cell growth” is principally associated with growth in cell numbers, which occurs by means of cell reproduction (i.e. proliferation) when the rate of the latter is greater than the rate of cell death (e.g. by apoptosis or necrosis), to produce an increase in the size of a population of cells, although a small component of that growth may in certain circumstances be due also to an increase in cell size or cytoplasmic volume of individual cells. An agent that inhibits cell growth can thus do so by either inhibiting proliferation or stimulating cell death, or both, such that the equilibrium between these two opposing processes is altered.

[0543] Cell type: As used herein, the term “cell type” refers to a cell from a given source (e.g., a tissue, organ) or a cell in a given state of differentiation, or a cell associated with a given pathology or genetic makeup.

[0544] Chromosome: As used herein, the term “chromosome” refers to an organized structure of DNA and protein found in cells.

[0545] Complementary: As used herein, the term “complementary” as it relates to nucleic acids refers to hybridization or base pairing between nucleotides or nucleic acids, such as, for example, between the two strands of a double-stranded DNA molecule or between an oligonucleotide probe and a target are complementary.

[0546] Condition: As used herein, the term “condition” refers to the status of any cell, organ, organ system or organism. Conditions may reflect a disease state or simply the physiologic presentation or situation of an entity. Conditions may be characterized as phenotypic conditions such as the macroscopic presentation of a disease or genotypic conditions such as the underlying gene or protein expression profiles associated with the condition. Conditions may be benign or malignant.

[0547] Controlled Release: As used herein, the term “controlled release” refers to a pharmaceutical composition or compound release profile that conforms to a particular pattern of release to effect a therapeutic outcome.

[0548] Cytostatic: As used herein, “cytostatic” refers to inhibiting, reducing, suppressing the growth, division, or multiplication of a cell (e.g., a mammalian cell (e.g., a human cell)), bacterium, virus, fungus, protozoan, parasite, prion, or a combination thereof.

[0549] Cytotoxic: As used herein, “cytotoxic” refers to killing or causing injurious, toxic, or deadly effect on a cell (e.g., a mammalian cell (e.g., a human cell)), bacterium, virus, fungus, protozoan, parasite, prion, or a combination thereof.

[0550] Delivery: As used herein, “delivery” refers to the act or manner of delivering a compound, substance, entity, moiety, cargo or payload.

[0551] Delivery Agent: As used herein, “delivery agent” refers to any substance which facilitates, at least in part, the in vivo delivery of a saRNA of the present invention to targeted cells.

[0552] Destabilized: As used herein, the term “destable,” “destabilize,” or “destabilizing region” means a region or molecule that is less stable than a starting, wild-type or native form of the same region or molecule.

[0553] Detectable label: As used herein, “detectable label” refers to one or more markers, signals, or moieties which are attached, incorporated or associated with another entity that is readily detected by methods known in the art including radiography, fluorescence, chemiluminescence, enzymatic activity, absorbance and the like. Detectable labels include radioisotopes, fluorophores, chromophores, enzymes, dyes, metal ions, ligands such as biotin, avidin, streptavidin and haptens, quantum dots, and the like. Detectable labels may be located at any position in the oligonucleotides disclosed herein. They may be within the nucleotides or located at the 5′ or 3′ terminus.

[0554] Encapsulate: As used herein, the term “encapsulate” means to enclose, surround or encase.

[0555] Engineered: As used herein, embodiments of the invention are “engineered” when they are designed to have a feature or property, whether structural or chemical, that varies from a starting point, wild type or native molecule.

[0556] Equivalent subject: As used herein, “equivalent subject” may be e.g. a subject of similar age, sex and health such as liver health or cancer stage, or the same subject prior to treatment according to the invention. The equivalent subject is “untreated” in that he does not receive treatment with an saRNA according to the invention. However, he may receive a conventional anti-cancer treatment, provided that the subject who is treated with the saRNA of the invention receives the same or equivalent conventional anti-cancer treatment.

[0557] Exosome: As used herein, “exosome” is a vesicle secreted by mammalian cells.

[0558] Expression: As used herein, “expression” of a nucleic acid sequence refers to one or more of the following events: (1) production of an RNA template from a DNA sequence (e.g., by transcription); (2) processing of an RNA transcript (e.g., by splicing, editing, 5′ cap formation, and/or 3′ end processing); (3) translation of an RNA into a polypeptide or protein; and (4) post-translational modification of a polypeptide or protein.

[0559] Feature: As used herein, a “feature” refers to a characteristic, a property, or a distinctive element.

[0560] Formulation: As used herein, a “formulation” includes at least one saRNA of the present invention and a delivery agent.

[0561] Fragment: A “fragment,” as used herein, refers to a portion. For example, fragments of proteins may comprise polypeptides obtained by digesting full-length protein isolated from cultured cells. Fragments of oligonucleotides may comprise nucleotides, or regions of nucleotides.

[0562] Functional: As used herein, a “functional” biological molecule is a biological molecule in a form in which it exhibits a property and/or activity by which it is characterized.

[0563] Gene: As used herein, the term “gene” refers to a nucleic acid sequence that comprises control and most often coding sequences necessary for producing a polypeptide or precursor. Genes, however, may not be translated and instead code for regulatory or structural RNA molecules.

[0564] A gene may be derived in whole or in part from any source known to the art, including a plant, a fungus, an animal, a bacterial genome or episome, eukaryotic, nuclear or plasmid DNA, cDNA, viral DNA, or chemically synthesized DNA. A gene may contain one or more modifications in either the coding or the untranslated regions that could affect the biological activity or the chemical structure of the expression product, the rate of expression, or the manner of expression control. Such modifications include, but are not limited to, mutations, insertions, deletions, and substitutions of one or more nucleotides. The gene may constitute an uninterrupted coding sequence or it may include one or more introns, bound by the appropriate splice junctions.

[0565] Gene expression: As used herein, the term “gene expression” refers to the process by which a nucleic acid sequence undergoes successful transcription and in most instances translation to produce a protein or peptide. For clarity, when reference is made to measurement of “gene expression”, this should be understood to mean that measurements may be of the nucleic acid product of transcription, e.g., RNA or mRNA or of the amino acid product of translation, e.g., polypeptides or peptides. Methods of measuring the amount or levels of RNA, mRNA, polypeptides and peptides are well known in the art.

[0566] Genome: The term “genome” is intended to include the entire DNA complement of an organism, including the nuclear DNA component, chromosomal or extrachromosomal DNA, as well as the cytoplasmic domain (e.g., mitochondrial DNA).

[0567] Homology: As used herein, the term “homology” refers to the overall relatedness between polymeric molecules, e.g. between nucleic acid molecules (e.g. DNA molecules and/or RNA molecules) and/or between polypeptide molecules. In some embodiments, polymeric molecules are considered to be “homologous” to one another if their sequences are at least 25%, 30%, 35%, 40%, 45%, 50%, 55%, 60%, 65%, 70%, 75%, 80%, 85%, 90%, 95%, or 99% identical or similar. The term “homologous” necessarily refers to a comparison between at least two sequences (polynucleotide or polypeptide sequences). In accordance with the invention, two polynucleotide sequences are considered to be homologous if the polypeptides they encode are at least about 50%, 60%, 70%, 80%, 90%, 95%, or even 99% for at least one stretch of at least about 20 amino acids. In some embodiments, homologous polynucleotide sequences are characterized by the ability to encode a stretch of at least 4-5 uniquely specified amino acids. For polynucleotide sequences less than 60 nucleotides in length, homology is determined by the ability to encode a stretch of at least 4-5 uniquely specified amino acids. In accordance with the invention, two protein sequences are considered to be homologous if the proteins are at least about 50%, 60%, 70%, 80%, or 90% identical for at least one stretch of at least about 20 amino acids.

[0568] The term “hyperproliferative cell” may refer to any cell that is proliferating at a rate that is abnormally high in comparison to the proliferating rate of an equivalent healthy cell (which may be referred to as a “control”). An “equivalent healthy” cell is the normal, healthy counterpart of a cell. Thus, it is a cell of the same type, e.g. from the same organ, which performs the same functions(s) as the comparator cell. For example, proliferation of a hyperproliferative hepatocyte should be assessed by reference to a healthy hepatocyte, whereas proliferation of a hyperproliferative prostate cell should be assessed by reference to a healthy prostate cell.

[0569] By an “abnormally high” rate of proliferation, it is meant that the rate of proliferation of the hyperproliferative cells is increased by at least 20, 30, 40%, or at least 45, 50, 55, 60, 65, 70, 75%, or at least 80%, as compared to the proliferative rate of equivalent, healthy (non-hyperproliferative) cells. The “abnormally high” rate of proliferation may also refer to a rate that is increased by a factor of at least 2, 3, 4, 5, 6, 7, 8, 9, 10, or by a factor of at least 15, 20, 25, 30, 35, 40, 45, 50, or by a factor of at least 60, 70, 80, 90, 100, compared to the proliferative rate of equivalent, healthy cells.

[0570] Hyperproliferative disorder: As used herein, a “hyperproliferative disorder” may be any disorder which involves hyperproliferative cells as defined above. Examples of hyperproliferative disorders include neoplastic disorders such as cancer, psoriatic arthritis, rheumatoid arthritis, gastric hyperproliferative disorders such as inflammatory bowel disease, skin disorders including psoriasis, Reiter's syndrome, pityriasis rubra pilaris, and hyperproliferative variants of the disorders of keratinization.

[0571] The skilled person is fully aware of how to identify a hyperproliferative cell. The presence of hyperproliferative cells within an animal may be identifiable using scans such as X-rays, MRI or CT scans. The hyperproliferative cell may also be identified, or the proliferation of cells may be assayed, through the culturing of a sample in vitro using cell proliferation assays, such as MTT, XTT, MTS or WST-1 assays. Cell proliferation in vitro can also be determined using flow cytometry.

[0572] Identity: As used herein, the term “identity” refers to the overall relatedness between polymeric molecules, e.g., between oligonucleotide molecules (e.g. DNA molecules and/or RNA molecules) and/or between polypeptide molecules. Calculation of the percent identity of two polynucleotide sequences, for example, can be performed by aligning the two sequences for optimal comparison purposes (e.g., gaps can be introduced in one or both of a first and a second nucleic acid sequences for optimal alignment and non-identical sequences can be disregarded for comparison purposes). In certain embodiments, the length of a sequence aligned for comparison purposes is at least 30%, at least 40%, at least 50%, at least 60%, at least 70%, at least 80%, at least 90%, at least 95%, or 100% of the length of the reference sequence. The nucleotides at corresponding nucleotide positions are then compared. When a position in the first sequence is occupied by the same nucleotide as the corresponding position in the second sequence, then the molecules are identical at that position. The percent identity between the two sequences is a function of the number of identical positions shared by the sequences, taking into account the number of gaps, and the length of each gap, which needs to be introduced for optimal alignment of the two sequences. The comparison of sequences and determination of percent identity between two sequences can be accomplished using a mathematical algorithm. For example, the percent identity between two nucleotide sequences can be determined using methods such as those described in Computational Molecular Biology, Lesk, A. M., ed., Oxford University Press, New York, 1988; Biocomputing: Informatics and Genome Projects, Smith, D. W., ed., Academic Press, New York, 1993; Sequence Analysis in Molecular Biology, von Heinje, G., Academic Press, 1987; Computer Analysis of Sequence Data, Part I, Griffin, A. M., and Griffin, H. G., eds., Humana Press, New Jersey, 1994; and Sequence Analysis Primer, Gribskov, M. and Devereux, J., eds., M Stockton Press, New York, 1991; each of which is incorporated herein by reference. For example, the percent identity between two nucleotide sequences can be determined using the algorithm of Meyers and Miller (CABIOS, 1989, 4:11-17), which has been incorporated into the ALIGN program (version 2.0) using a PAM120 weight residue table, a gap length penalty of 12 and a gap penalty of 4. The percent identity between two nucleotide sequences can, alternatively, be determined using the GAP program in the GCG software package using an NWSgapdna.CMP matrix. Methods commonly employed to determine percent identity between sequences include, but are not limited to those disclosed in Carillo, H., and Lipman, D., SIAM J Applied Math., 48:1073 (1988); incorporated herein by reference. Techniques for determining identity are codified in publicly available computer programs. Exemplary computer software to determine homology between two sequences include, but are not limited to, GCG program package, Devereux, J., et al., Nucleic Acids Research, 12(1), 387 (1984)), BLASTP, BLASTN, and FASTA Altschul, S. F. et al., J. Molec. Biol., 215, 403 (1990)).

[0573] Inhibit expression of a gene: As used herein, the phrase “inhibit expression of a gene” means to cause a reduction in the amount of an expression product of the gene. The expression product can be an RNA transcribed from the gene (e.g., an mRNA) or a polypeptide translated from an mRNA transcribed from the gene. Typically a reduction in the level of an mRNA results in a reduction in the level of a polypeptide translated therefrom. The level of expression may be determined using standard techniques for measuring mRNA or protein.

[0574] In vitro: As used herein, the term “in vitro” refers to events that occur in an artificial environment, e.g., in a test tube or reaction vessel, in cell culture, in a Petri dish, etc., rather than within an organism (e.g., animal, plant, or microbe).

[0575] In vivo: As used herein, the term “in vivo” refers to events that occur within an organism (e.g., animal, plant, or microbe or cell or tissue thereof).

[0576] Isolated: As used herein, the term “isolated” refers to a substance or entity that has been separated from at least some of the components with which it was associated (whether in nature or in an experimental setting). Isolated substances may have varying levels of purity in reference to the substances from which they have been associated. Isolated substances and/or entities may be separated from at least about 10%, about 20%, about 30%, about 40%, about 50%, about 60%, about 70%, about 80%, about 90%, or more of the other components with which they were initially associated. In some embodiments, isolated agents are more than about 80%, about 85%, about 90%, about 91%, about 92%, about 93%, about 94%, about 95%, about 96%, about 97%, about 98%, about 99%, or more than about 99% pure. As used herein, a substance is “pure” if it is substantially free of other components. Substantially isolated: By “substantially isolated” is meant that the compound is substantially separated from the environment in which it was formed or detected. Partial separation can include, for example, a composition enriched in the compound of the present disclosure. Substantial separation can include compositions containing at least about 50%, at least about 60%, at least about 70%, at least about 80%, at least about 90%, at least about 95%, at least about 97%, or at least about 99% by weight of the compound of the present disclosure, or salt thereof. Methods for isolating compounds and their salts are routine in the art.

[0577] Label: The term “label” refers to a substance or a compound which is incorporated into an object so that the substance, compound or object may be detectable.

[0578] Linker: As used herein, a linker refers to a group of atoms, e.g., 10-1,000 atoms, and can be comprised of the atoms or groups such as, but not limited to, carbon, amino, alkylamino, oxygen, sulfur, sulfoxide, sulfonyl, carbonyl, and imine. The linker can be attached to a modified nucleoside or nucleotide on the nucleobase or sugar moiety at a first end, and to a payload, e.g., a detectable or therapeutic agent, at a second end. The linker may be of sufficient length as to not interfere with incorporation into a nucleic acid sequence. The linker can be used for any useful purpose, such as to form saRNA conjugates, as well as to administer a payload, as described herein.

[0579] Examples of chemical groups that can be incorporated into the linker include, but are not limited to, alkyl, alkenyl, alkynyl, amido, amino, ether, thioether, ester, alkylene, heteroalkylene, aryl, or heterocyclyl, each of which can be optionally substituted, as described herein. Examples of linkers include, but are not limited to, unsaturated alkanes, polyethylene glycols (e.g., ethylene or propylene glycol monomeric units, e.g., diethylene glycol, dipropylene glycol, triethylene glycol, tripropylene glycol, tetraethylene glycol, or tetraethylene glycol), and dextran polymers and derivatives thereof. Other examples include, but are not limited to, cleavable moieties within the linker, such as, for example, a disulfide bond (—S—S—) or an azo bond (—N═N—), which can be cleaved using a reducing agent or photolysis. Non-limiting examples of a selectively cleavable bond include an amido bond can be cleaved for example by the use of tris(2-carboxyethyl)phosphine (TCEP), or other reducing agents, and/or photolysis, as well as an ester bond can be cleaved for example by acidic or basic hydrolysis.

[0580] Metastasis: As used herein, the term “metastasis” means the process by which cancer spreads from the place at which it first arose as a primary tumor to distant locations in the body. Metastasis also refers to cancers resulting from the spread of the primary tumor. For example, someone with breast cancer may show metastases in their lymph system, liver, bones or lungs.

[0581] Modified: As used herein “modified” refers to a changed state or structure of a molecule of the invention. Molecules may be modified in many ways including chemically, structurally, and functionally. In one embodiment, the saRNAs of the present invention are modified by the introduction of non-natural nucleosides and/or nucleotides.

[0582] Naturally occurring: As used herein, “naturally occurring” means existing in nature without artificial aid.

[0583] Nucleic acid: The term “nucleic acid” as used herein, refers to a molecule comprised of one or more nucleotides, i.e., ribonucleotides, deoxyribonucleotides, or both. The term includes monomers and polymers of ribonucleotides and deoxyribonucleotides, with the ribonucleotides and/or deoxyribonucleotides being bound together, in the case of the polymers, via 5′ to 3′ linkages. The ribonucleotide and deoxyribonucleotide polymers may be single or double-stranded. However, linkages may include any of the linkages known in the art including, for example, nucleic acids comprising 5′ to 3′ linkages. The nucleotides may be naturally occurring or may be synthetically produced analogs that are capable of forming base-pair relationships with naturally occurring base pairs. Examples of non-naturally occurring bases that are capable of forming base-pairing relationships include, but are not limited to, aza and deaza pyrimidine analogs, aza and deaza purine analogs, and other heterocyclic base analogs, wherein one or more of the carbon and nitrogen atoms of the pyrimidine rings have been substituted by heteroatoms, e.g., oxygen, sulfur, selenium, phosphorus, and the like.

[0584] Patient: As used herein, “patient” refers to a subject who may seek or be in need of treatment, requires treatment, is receiving treatment, will receive treatment, or a subject who is under care by a trained professional for a particular disease or condition.

[0585] Peptide: As used herein, “peptide” is less than or equal to 50 amino acids long, e.g., about 5, 10, 15, 20, 25, 30, 35, 40, 45, or 50 amino acids long.

[0586] Pharmaceutically acceptable: The phrase “pharmaceutically acceptable” is employed herein to refer to those compounds, materials, compositions, and/or dosage forms which are, within the scope of sound medical judgment, suitable for use in contact with the tissues of human beings and animals without excessive toxicity, irritation, allergic response, or other problem or complication, commensurate with a reasonable benefit/risk ratio.

[0587] Pharmaceutically acceptable excipients: The phrase “pharmaceutically acceptable excipient,” as used herein, refers any ingredient other than the compounds described herein (for example, a vehicle capable of suspending or dissolving the active compound) and having the properties of being substantially nontoxic and non-inflammatory in a patient. Excipients may include, for example: antiadherents, antioxidants, binders, coatings, compression aids, disintegrants, dyes (colors), emollients, emulsifiers, fillers (diluents), film formers or coatings, flavors, fragrances, glidants (flow enhancers), lubricants, preservatives, printing inks, sorbents, suspensing or dispersing agents, sweeteners, and waters of hydration. Exemplary excipients include, but are not limited to: butylated hydroxytoluene (BHT), calcium carbonate, calcium phosphate (dibasic), calcium stearate, croscarmellose, crosslinked polyvinyl pyrrolidone, citric acid, crospovidone, cysteine, ethylcellulose, gelatin, hydroxypropyl cellulose, hydroxypropyl methylcellulose, lactose, magnesium stearate, maltitol, mannitol, methionine, methylcellulose, methyl paraben, microcrystalline cellulose, polyethylene glycol, polyvinyl pyrrolidone, povidone, pregelatinized starch, propyl paraben, retinyl palmitate, shellac, silicon dioxide, sodium carboxymethyl cellulose, sodium citrate, sodium starch glycolate, sorbitol, starch (corn), stearic acid, sucrose, talc, titanium dioxide, vitamin A, vitamin E, vitamin C, and xylitol.

[0588] Pharmaceutically acceptable salts: The present disclosure also includes pharmaceutically acceptable salts of the compounds described herein. As used herein, “pharmaceutically acceptable salts” refers to derivatives of the disclosed compounds wherein the parent compound is modified by converting an existing acid or base moiety to its salt form (e.g., by reacting the free base group with a suitable organic acid). Examples of pharmaceutically acceptable salts include, but are not limited to, mineral or organic acid salts of basic residues such as amines; alkali or organic salts of acidic residues such as carboxylic acids; and the like. Representative acid addition salts include acetate, adipate, alginate, ascorbate, aspartate, benzenesulfonate, benzoate, bisulfate, borate, butyrate, camphorate, camphorsulfonate, citrate, cyclopentanepropionate, digluconate, dodecylsulfate, ethanesulfonate, fumarate, glucoheptonate, glycerophosphate, hemisulfate, heptonate, hexanoate, hydrobromide, hydrochloride, hydroiodide, 2-hydroxy-ethanesulfonate, lactobionate, lactate, laurate, lauryl sulfate, malate, maleate, malonate, methanesulfonate, 2-naphthalenesulfonate, nicotinate, nitrate, oleate, oxalate, palmitate, pamoate, pectinate, persulfate, 3-phenylpropionate, phosphate, picrate, pivalate, propionate, stearate, succinate, sulfate, tartrate, thiocyanate, toluenesulfonate, undecanoate, valerate salts, and the like. Representative alkali or alkaline earth metal salts include sodium, lithium, potassium, calcium, magnesium, and the like, as well as nontoxic ammonium, quaternary ammonium, and amine cations, including, but not limited to ammonium, tetramethylammonium, tetraethylammonium, methylamine, dimethylamine, trimethylamine, triethylamine, ethylamine, and the like. The pharmaceutically acceptable salts of the present disclosure include the conventional non-toxic salts of the parent compound formed, for example, from non-toxic inorganic or organic acids. The pharmaceutically acceptable salts of the present disclosure can be synthesized from the parent compound which contains a basic or acidic moiety by conventional chemical methods. Generally, such salts can be prepared by reacting the free acid or base forms of these compounds with a stoichiometric amount of the appropriate base or acid in water or in an organic solvent, or in a mixture of the two; generally, nonaqueous media like ether, ethyl acetate, ethanol, isopropanol, or acetonitrile are preferred. Lists of suitable salts are found in Remington's Pharmaceutical Sciences, 17^{th} ed., Mack Publishing Company, Easton, Pa., 1985, p. 1418, Pharmaceutical Salts: Properties, Selection, and Use, P. H. Stahl and C. G. Wermuth (eds.), Wiley-VCH, 2008, and Berge et al., Journal of Pharmaceutical Science, 66, 1-19 (1977), each of which is incorporated herein by reference in its entirety.

[0589] Pharmaceutically acceptable solvate: The term “pharmaceutically acceptable solvate,” as used herein, means a compound of the invention wherein molecules of a suitable solvent are incorporated in the crystal lattice. A suitable solvent is physiologically tolerable at the dosage administered. For example, solvates may be prepared by crystallization, recrystallization, or precipitation from a solution that includes organic solvents, water, or a mixture thereof. Examples of suitable solvents are ethanol, water (for example, mono-, di-, and tri-hydrates), N-methylpyrrolidinone (NMP), dimethyl sulfoxide (DMSO), N,N′-dimethylformamide (DMF), N,N′-dimethylacetamide (DMAC), 1,3-dimethyl-2-imidazolidinone (DMEU), 1,3-dimethyl-3,4,5,6-tetrahydro-2-(1H)-pyrimidinone (DMPU), acetonitrile (ACN), propylene glycol, ethyl acetate, benzyl alcohol, 2-pyrrolidone, benzyl benzoate, and the like. When water is the solvent, the solvate is referred to as a “hydrate.”

[0590] Pharmacologic effect: As used herein, a “pharmacologic effect” is a measurable biologic phenomenon in an organism or system which occurs after the organism or system has been contacted with or exposed to an exogenous agent. Pharmacologic effects may result in therapeutically effective outcomes such as the treatment, improvement of one or more symptoms, diagnosis, prevention, and delay of onset of disease, disorder, condition or infection. Measurement of such biologic phenomena may be quantitative, qualitative or relative to another biologic phenomenon. Quantitative measurements may be statistically significant. Qualitative measurements may be by degree or kind and may be at least 10%, 20%, 30%, 40%, 50%, 60%, 70%, 80%, 90% or more different. They may be observable as present or absent, better or worse, greater or less. Exogenous agents, when referring to pharmacologic effects are those agents which are, in whole or in part, foreign to the organism or system. For example, modifications to a wild type biomolecule, whether structural or chemical, would produce an exogenous agent. Likewise, incorporation or combination of a wild type molecule into or with a compound, molecule or substance not found naturally in the organism or system would also produce an exogenous agent.

[0591] The saRNA of the present invention, comprises exogenous agents. Examples of pharmacologic effects include, but are not limited to, alteration in cell count such as an increase or decrease in neutrophils, reticulocytes, granulocytes, erythrocytes (red blood cells), megakaryocytes, platelets, monocytes, connective tissue macrophages, epidermal langerhans cells, osteoclasts, dendritic cells, microglial cells, neutrophils, eosinophils, basophils, mast cells, helper T cells, suppressor T cells, cytotoxic T cells, natural killer T cells, B cells, natural killer cells, or reticulocytes. Pharmacologic effects also include alterations in blood chemistry, pH, hemoglobin, hematocrit, changes in levels of enzymes such as, but not limited to, liver enzymes AST and ALT, changes in lipid profiles, electrolytes, metabolic markers, hormones or other marker or profile known to those of skill in the art.

[0592] Physicochemical: As used herein, “physicochemical” means of or relating to a physical and/or chemical property.

[0593] Preventing: As used herein, the term “preventing” refers to partially or completely delaying onset of an infection, disease, disorder and/or condition; partially or completely delaying onset of one or more symptoms, features, or clinical manifestations of a particular infection, disease, disorder, and/or condition; partially or completely delaying onset of one or more symptoms, features, or manifestations of a particular infection, disease, disorder, and/or condition; partially or completely delaying progression from an infection, a particular disease, disorder and/or condition; and/or decreasing the risk of developing pathology associated with the infection, the disease, disorder, and/or condition.

[0594] Prodrug: The present disclosure also includes prodrugs of the compounds described herein. As used herein, “prodrugs” refer to any substance, molecule or entity which is in a form predicate for that substance, molecule or entity to act as a therapeutic upon chemical or physical alteration. Prodrugs may by covalently bonded or sequestered in some way and which release or are converted into the active drug moiety prior to, upon or after administered to a mammalian subject. Prodrugs can be prepared by modifying functional groups present in the compounds in such a way that the modifications are cleaved, either in routine manipulation or in vivo, to the parent compounds. Prodrugs include compounds wherein hydroxyl, amino, sulfhydryl, or carboxyl groups are bonded to any group that, when administered to a mammalian subject, cleaves to form a free hydroxyl, amino, sulfhydryl, or carboxyl group respectively. Preparation and use of prodrugs is discussed in T. Higuchi and V. Stella, “Pro-drugs as Novel Delivery Systems,” Vol. 14 of the A.C.S. Symposium Series, and in Bioreversible Carriers in Drug Design, ed. Edward B. Roche, American Pharmaceutical Association and Pergamon Press, 1987, both of which are hereby incorporated by reference in their entirety.

[0595] Prognosing: As used herein, the term “prognosing” means a statement or claim that a particular biologic event will, or is very likely to, occur in the future.

[0596] Progression: As used herein, the term “progression” or “cancer progression” means the advancement or worsening of or toward a disease or condition.

[0597] Proliferate: As used herein, the term “proliferate” means to grow, expand or increase or cause to grow, expand or increase rapidly. “Proliferative” means having the ability to proliferate. “Anti-proliferative” means having properties counter to or inapposite to proliferative properties.

[0598] Protein: A “protein” means a polymer of amino acid residues linked together by peptide bonds. The term, as used herein, refers to proteins, polypeptides, and peptides of any size, structure, or function. Typically, however, a protein will be at least 50 amino acids long. In some instances the protein encoded is smaller than about 50 amino acids. In this case, the polypeptide is termed a peptide. If the protein is a short peptide, it will be at least about 10 amino acid residues long. A protein may be naturally occurring, recombinant, or synthetic, or any combination of these. A protein may also comprise a fragment of a naturally occurring protein or peptide. A protein may be a single molecule or may be a multi-molecular complex. The term protein may also apply to amino acid polymers in which one or more amino acid residues are an artificial chemical analogue of a corresponding naturally occurring amino acid.

[0599] Protein expression: The term “protein expression” refers to the process by which a nucleic acid sequence undergoes translation such that detectable levels of the amino acid sequence or protein are expressed.

[0600] Purified: As used herein, “purify,” “purified,” “purification” means to make substantially pure or clear from unwanted components, material defilement, admixture or imperfection.

[0601] Regression: As used herein, the term “regression” or “degree of regression” refers to the reversal, either phenotypically or genotypically, of a cancer progression. Slowing or stopping cancer progression may be considered regression.

[0602] Sample: As used herein, the term “sample” or “biological sample” refers to a subset of its tissues, cells or component parts (e.g. body fluids, including but not limited to blood, mucus, lymphatic fluid, synovial fluid, cerebrospinal fluid, saliva, amniotic fluid, amniotic cord blood, urine, vaginal fluid and semen). A sample further may include a homogenate, lysate or extract prepared from a whole organism or a subset of its tissues, cells or component parts, or a fraction or portion thereof, including but not limited to, for example, plasma, serum, spinal fluid, lymph fluid, the external sections of the skin, respiratory, intestinal, and genitourinary tracts, tears, saliva, milk, blood cells, tumors, organs. A sample further refers to a medium, such as a nutrient broth or gel, which may contain cellular components, such as proteins or nucleic acid molecule.

[0603] Signal Sequences: As used herein, the phrase “signal sequences” refers to a sequence which can direct the transport or localization of a protein.

[0604] Single unit dose: As used herein, a “single unit dose” is a dose of any therapeutic administered in one dose/at one time/single route/single point of contact, i.e., single administration event.

[0605] Similarity: As used herein, the term “similarity” refers to the overall relatedness between polymeric molecules, e.g. between polynucleotide molecules (e.g. DNA molecules and/or RNA molecules) and/or between polypeptide molecules. Calculation of percent similarity of polymeric molecules to one another can be performed in the same manner as a calculation of percent identity, except that calculation of percent similarity takes into account conservative substitutions as is understood in the art.

[0606] Split dose: As used herein, a “split dose” is the division of single unit dose or total daily dose into two or more doses.

[0607] Stable: As used herein “stable” refers to a compound that is sufficiently robust to survive isolation to a useful degree of purity from a reaction mixture, and in one embodiment, capable of formulation into an efficacious therapeutic agent.

[0608] Stabilized: As used herein, the term “stabilize”, “stabilized,” “stabilized region” means to make or become stable.

[0609] Subject: As used herein, the term “subject” or “patient” refers to any organism to which a composition in accordance with the invention may be administered, e.g., for experimental, diagnostic, prophylactic, and/or therapeutic purposes. Typical subjects include animals (e.g., mammals such as mice, rats, rabbits, non-human primates, and humans) and/or plants.

[0610] Substantially: As used herein, the term “substantially” refers to the qualitative condition of exhibiting total or near-total extent or degree of a characteristic or property of interest. One of ordinary skill in the biological arts will understand that biological and chemical phenomena rarely, if ever, go to completion and/or proceed to completeness or achieve or avoid an absolute result. The term “substantially” is therefore used herein to capture the potential lack of completeness inherent in many biological and chemical phenomena.

[0611] Substantially equal: As used herein as it relates to time differences between doses, the term means plus/minus 2%.

[0612] Substantially simultaneously: As used herein and as it relates to plurality of doses, the term means within 2 seconds.

[0613] Suffering from: An individual who is “suffering from” a disease, disorder, and/or condition has been diagnosed with or displays one or more symptoms of a disease, disorder, and/or condition.

[0614] Susceptible to: An individual who is “susceptible to” a disease, disorder, and/or condition has not been diagnosed with and/or may not exhibit symptoms of the disease, disorder, and/or condition but harbors a propensity to develop a disease or its symptoms. In some embodiments, an individual who is susceptible to a disease, disorder, and/or condition (for example, cancer) may be characterized by one or more of the following: (1) a genetic mutation associated with development of the disease, disorder, and/or condition; (2) a genetic polymorphism associated with development of the disease, disorder, and/or condition; (3) increased and/or decreased expression and/or activity of a protein and/or nucleic acid associated with the disease, disorder, and/or condition; (4) habits and/or lifestyles associated with development of the disease, disorder, and/or condition; (5) a family history of the disease, disorder, and/or condition; and (6) exposure to and/or infection with a microbe associated with development of the disease, disorder, and/or condition. In some embodiments, an individual who is susceptible to a disease, disorder, and/or condition will develop the disease, disorder, and/or condition. In some embodiments, an individual who is susceptible to a disease, disorder, and/or condition will not develop the disease, disorder, and/or condition.

[0615] Sustained release: As used herein, the term “sustained release” refers to a pharmaceutical composition or compound release profile that conforms to a release rate over a specific period of time.

[0616] Synthetic: The term “synthetic” means produced, prepared, and/or manufactured by the hand of man. Synthesis of polynucleotides or polypeptides or other molecules of the present invention may be chemical or enzymatic.

[0617] Targeted Cells: As used herein, “targeted cells” refers to any one or more cells of interest. The cells may be found in vitro, in vivo, in situ or in the tissue or organ of an organism. The organism may be an animal, in one embodiment, a mammal, or a human and most In one embodiment, a patient.

[0618] Therapeutic Agent: The term “therapeutic agent” refers to any agent that, when administered to a subject, has a therapeutic, diagnostic, and/or prophylactic effect and/or elicits a desired biological and/or pharmacological effect.

[0619] Therapeutically effective amount: As used herein, the term “therapeutically effective amount” means an amount of an agent to be delivered (e.g., nucleic acid, drug, therapeutic agent, diagnostic agent, prophylactic agent, etc.) that is sufficient, when administered to a subject suffering from or susceptible to an infection, disease, disorder, and/or condition, to treat, improve symptoms of, diagnose, prevent, and/or delay the onset of the infection, disease, disorder, and/or condition.

[0620] Therapeutically effective outcome: As used herein, the term “therapeutically effective outcome” means an outcome that is sufficient in a subject suffering from or susceptible to an infection, disease, disorder, and/or condition, to treat, improve symptoms of, diagnose, prevent, and/or delay the onset of the infection, disease, disorder, and/or condition.

[0621] Total daily dose: As used herein, a “total daily dose” is an amount given or prescribed in 24 hour period. It may be administered as a single unit dose.

[0622] Transcription factor: As used herein, the term “transcription factor” refers to a DNA-binding protein that regulates transcription of DNA into RNA, for example, by activation or repression of transcription. Some transcription factors effect regulation of transcription alone, while others act in concert with other proteins. Some transcription factor can both activate and repress transcription under certain conditions. In general, transcription factors bind a specific target sequence or sequences highly similar to a specific consensus sequence in a regulatory region of a target gene. Transcription factors may regulate transcription of a target gene alone or in a complex with other molecules.

[0623] Treating: As used herein, the term “treating” refers to partially or completely alleviating, ameliorating, improving, relieving, delaying onset of, inhibiting progression of, reducing severity of, and/or reducing incidence of one or more symptoms or features of a particular infection, disease, disorder, and/or condition. For example, “treating” cancer may refer to inhibiting survival, growth, and/or spread of a tumor. Treatment may be administered to a subject who does not exhibit signs of a disease, disorder, and/or condition and/or to a subject who exhibits only early signs of a disease, disorder, and/or condition for the purpose of decreasing the risk of developing pathology associated with the disease, disorder, and/or condition.

[0624] The phrase “a method of treating” or its equivalent, when applied to, for example, cancer refers to a procedure or course of action that is designed to reduce, eliminate or prevent the number of cancer cells in an individual, or to alleviate the symptoms of a cancer. “A method of treating” cancer or another proliferative disorder does not necessarily mean that the cancer cells or other disorder will, in fact, be completely eliminated, that the number of cells or disorder will, in fact, be reduced, or that the symptoms of a cancer or other disorder will, in fact, be alleviated. Often, a method of treating cancer will be performed even with a low likelihood of success, but which, given the medical history and estimated survival expectancy of an individual, is nevertheless deemed an overall beneficial course of action.

[0625] Tumor growth: As used herein, the term “tumor growth” or “tumor metastases growth”, unless otherwise indicated, is used as commonly used in oncology, where the term is principally associated with an increased mass or volume of the tumor or tumor metastases, primarily as a result of tumor cell growth.

[0626] Tumor Burden: As used herein, the term “tumor burden” refers to the total Tumor Volume of all tumor nodules with a diameter in excess of 3 mm carried by a subject.

[0627] Tumor Volume: As used herein, the term “tumor volume” refers to the size of a tumor. The tumor volume in mm³ is calculated by the formula: volume=(width)²×length/2.

[0628] Unmodified: As used herein, “unmodified” refers to any substance, compound or molecule prior to being changed in any way. Unmodified may, but does not always, refer to the wild type or native form of a biomolecule. Molecules may undergo a series of modifications whereby each modified molecule may serve as the “unmodified” starting molecule for a subsequent modification.

### Equivalents and Scope

[0629] Those skilled in the art will recognize, or be able to ascertain using no more than routine experimentation, many equivalents to the specific embodiments in accordance with the invention described herein. The scope of the present invention is not intended to be limited to the above Description, but rather is as set forth in the appended claims.

[0630] In the claims, articles such as “a,” “an,” and “the” may mean one or more than one unless indicated to the contrary or otherwise evident from the context. Claims or descriptions that include “or” between one or more members of a group are considered satisfied if one, more than one, or all of the group members are present in, employed in, or otherwise relevant to a given product or process unless indicated to the contrary or otherwise evident from the context. The invention includes embodiments in which exactly one member of the group is present in, employed in, or otherwise relevant to a given product or process. The invention includes embodiments in which more than one, or all of the group members are present in, employed in, or otherwise relevant to a given product or process.

[0631] It is also noted that the term “comprising” is intended to be open and permits the inclusion of additional elements or steps.

[0632] Where ranges are given, endpoints are included. Furthermore, it is to be understood that unless otherwise indicated or otherwise evident from the context and understanding of one of ordinary skill in the art, values that are expressed as ranges can assume any specific value or subrange within the stated ranges in different embodiments of the invention, to the tenth of the unit of the lower limit of the range, unless the context clearly dictates otherwise.

[0633] In addition, it is to be understood that any particular embodiment of the present invention that falls within the prior art may be explicitly excluded from any one or more of the claims. Since such embodiments are deemed to be known to one of ordinary skill in the art, they may be excluded even if the exclusion is not set forth explicitly herein. Any particular embodiment of the compositions of the invention (e.g., any nucleic acid or protein encoded thereby; any method of production; any method of use; etc.) can be excluded from any one or more claims, for any reason, whether or not related to the existence of prior art.

[0634] All cited sources, for example, references, publications, databases, database entries, and art cited herein, are incorporated into this application by reference, even if not expressly stated in the citation. In case of conflicting statements of a cited source and the instant application, the statement in the instant application shall control.

[0635] The invention is further illustrated by the following non-limiting examples.

### Examples

### Materials and Procedures

[0636] Transfection of saRNA

[0637] Sense and antisense strands of saRNA are synthesized. They are first annealed in water following a denaturing step at 90° C., followed by a gradual anneal step to room temperature.

### Western Blotting

[0638] For the Western blot analysis, saRNA is transfected into 1×10⁵ cells using the Lipofectamine 2000 Life Technologies, US) following the manufacturer's recommendation. Total protein lysates are collected at 48 hours and 72 hours post-transfection in a lysis buffer (1% NP-40 and 1% Triton-X100 in PBS). The 72 hours harvested RNA receives two sequential transfection of saRNA. The protein concentration is measured using the protein DC assay (Bio-rad). Approximately 100 ug of protein is loaded and resolved using standard SDS-PAGE on to Novex 4-20% Tris-Glycine Gels (Invitrogen). Proteins are separated by gel electrophoresis and transferred onto nitrocellulose membrane using a semi-dry blotting apparatus (Bio-Rad). The membranes are blocked in TBS containing 5% non-fat milk for 1 hour before incubating with primary antibodies for 1 hour at room temperature. After several washes, the blots are detected using BCIP/NTB reagent (Calbiochem). The blots are imaged using Geldoc system (UVP). RT-PCR

[0639] saRNA is transfected into 1×10⁵ cells. Total RNA is harvested post-transfection at 48 hours and 72 hours. The RNA isolated at 72 hours receives two sequential transfection of oligonucleotide. Total RNA is recovered using the RNAqueous-Micro kit (Ambion) following the manufacturer's recommendation. The RNA is quantified using a Nanodrop 2000 micro-sample quantitator. Approximately 200 ng of total RNA from each sample is reverse transcribed using the One Step RT-PCR kit (Qiagen) following the manufacturer's recommendation.

### Example 1

### Upregulation of APOA1 Gene Expression Through Transfection with APOA1-saRNA In Vitro

[0640] 20 nM, 50 nM or 100 nM of annealed APOA1-saRNA was transfected onto a monolayer of HepG2 cells using lipofectamine 2000 (Life Technologies, US) following the manufacturer's instructions. This process was repeated three times before cells were harvested for isolation of total RNA for mRNA analysis. APOA1-saRNAs used for this study were selected from APOA1-Pr-1′, APOA1-Pr-2′, APOA1-Pr-3′, APOA1-Pr-4′, APOA1-mm10-Pr-1′, APOA1-mm10-Pr-2′, APOA1-mm10-Pr-3′, APOA1-mm10-Pr-4′, APOA1-rn5-Pr-1′, APOA1-rn5-Pr-2′, APOA1-rn5-Pr-3′, APOA1-rn5-Pr-4′, APOA1.NM_000039-Pr-1′, APOA1.NM_000039-Pr-3′, APOA1.NM_000039-Pr-6′, APOA1.NM_000039-Pr-16′, APOA1.NM_000039-Pr-21′, APOA1.NM 000039-Pr-23′, APOA.NM_000039-Pr-25′, and APOA1.NM 000039-Pr-37′ in Table 3.

[0641] After transfection, the isolation of total RNA was performed using the RNAqueous-Micro kit (Ambion, UK) following the manufacturer's instructions. Briefly, the cells were gently centrifuged followed by 3 pulses of sonication at Output 3 in lysis buffer (AMBION, UK). The cell lysates were then processed through an RNA binding column, followed by multiple washes and elution. The total RNA isolated was quantified by a NANODROP 2000 spectrophotometer. 500 ng of total extracted RNA was processed for elimination of genomic DNA followed by reverse transcription using the QUANTITECT® Reverse Transcription kit from QIAGEN.

[0642] The isolated RNA extracts were analyzed using quantitative reverse transcriptase (qRT-PCR). Briefly, the extracts were reverse transcribed using First Strand cDNA synthesis kit (Qiagen). The cDNA was then amplified for quantitative analysis using QuantiFast® SYBR® Green PCT Kit from Qiagen. Amplification was performed using Applied Biosystems 7900HT FAST-Real-Time System with 40 cycle conditions at 95° C. for 15 seconds and 60° C. for 45 seconds with a total volume of 25 uL per sample. Amplified products were then analyzed using Applied Biosystems RQ Manager 1.2.1. 5 independent experiments were amplified in triplicates for quantitative analysis. Student T-Test scoring was performed at 99% confidence intervals.

[0643] APOA1 production was determined within the cells through the use of an APOA1 ELISA. Briefly, the cells were grown in phenol-red free RPMI media in the presence of charcoal stripped FCS. Following three sets of saRNA transfections at 8 hrs, 16 hrs and 24 hrs, the culture media was collected for total APOA1 ELISA.

[0644] As shown in FIG. 2A-2E, an increase in APOA1 mRNA levels only occurred in cells transfected with APOA1-saRNAs, not in control cells transfected with scramble saRNA.

### Example 2

### Upregulation of APOA1 Expression Through the Transfection with APOA1-sgRNA in Mouse Liver In Vivo

[0645] Ten Male C57BI6/J, 8 week old mice are used for the experiment (control group N=5). APOA1-saRNA used for this study is the same as Example 1.

[0646] APOA1-saRNA reconstituted with 100 μL of RNase/Dnase free H20. 50 μL of complex A and 50 μL of complex B (InvivoFectamine, Invitrogen, CA, USA) are mixed, incubated at 50° C. for 30 minutes and are used for tail vein injections. Control animals are injected with equal volume of PBS while a positive control animal received siRNA against APOA1; a total of 5 control and 5 experimental animals are injected.

[0647] After administration, the total RNA is isolated. Frozen tissue sections are placed into scintillation vials containing Trizol and homogenised for 30 seconds. The homogenate is then transferred in Falcon tubes for a further 2 minutes of homogenisation. Chloroform is then added to this and mixed by vortexing followed by a centrifugation step at 12,000 rpm for 15 minutes at 4° C. The aqueous upper phase is then transferred into a fresh microfuge tube where RNA is precipitated using 5 mg/ml of linear acrylamide (Ambion) and isopropanol overnight at −20° C. The RNA is pelleted by centrifugation at 12,000 rpm for 15 minutes at 4° C. and washed with ice cold 70% ethanol. The RNA is pelleted again at 7,500 rpm for 5 minutes at 4° C. The supernatant is removed immediately and the RNA pellet allowed to air dry. The RNA is dissolved in nuclease free water for immediate analysis for RNA integrity using a Bionanalyser.

[0648] The isolated RNA is analyzed using qRT-PCR as described in Example 1. APOA1 production is determined using an APOA1 ELISA as described in Example 1. The administration of APOA1-saRNA using a dendrimer delivery vehicle to a mouse leads to a significant increase in APOA1 within the blood circulation.

[0649] The effects of administration of APOA1-saRNA on overall liver function are determined according to the liver function markers gamma glutamyl transpeptidase, alanine aminotransferase, and aspartate aminotransferase or bilirubin.

[0650] APOA1-saRNA also affects other the expression of other genes according to the mRNA levels of these genes. Tissue samples from the treated mice are used to measure the expression levels of various genes. The mRNA transcript levels of these genes are measured by RT-PCT mRNA expression level.

### Example 3

### APOA1-saRNA Regulates Cholesterol, HDL and LDL Levels In Vitro

[0651] APOA1-saRNA is administered to mice in 0.1 nmol/uL standard dose, 2× doses, and 3× doses. Cholesterol, HDL and LDL levels in blood are measured. Dose increase of APOA1-saRNA altered circulating levels of cholesterol, HDL and LDL.

### Example 4

### Upregulation of LDLR Gene Expression Through Transfection with LDLR-saRNA In Vitro

[0652] The upregulation effects of LDLR-saRNA in vitro were measured with the method described in Example 1. 10 nM, 20 nM, 50 nM or 100 nM of annealed LDLR-saRNA was transfected onto a monolayer of AML12 cells using lipofectamine 2000 (Life Technologies, US) following the manufacturer's instructions. This process was repeated three times before cells were harvested for isolation of total RNA for mRNA analysis. LDLR-saRNAs used for this study were selected from LDLR-Pr-1′, LDLR-Pr-2′, LDLR-Pr-3′, LDLR-Pr-4′, LDLR-mm 10-Pr-1′, LDLR-mm10-Pr-2′, LDLR-mm10-Pr-3′, LDLR-mm10-Pr-4′, LDLR-rn5-Pr-1′, LDLR-rn5-Pr-2′, LDLR-rn5-Pr-3′, LDLR-rn5-Pr-4′, LDLR.NM_000527-Pr-4′, LDLR.NM_000527-Pr-6′, LDLR.NM_000527-Pr-7′, LDLR.NM_000527-Pr-13′, LDLR.NM_000527-Pr-22′, LDLR.NM_000527-Pr-23′, and LDLR.NM_000527-Pr-28′ in Table 5.

[0653] As shown in FIG. 3A-3E, LDLR mRNA levels showed an increase only in cells transfected with LDLR-saRNAs, not in control cells transfected with scramble saRNA.

### Example 5

### Upregulation of LDLR Expression Through the Transfection with LDLR-saRNA in Mouse Liver In Vivo

[0654] The upregulation effects of LDLR-saRNA in vivo are measured with the method described in Example 2 Ten Male C57BI6/J, 8 week old mice are used for the experiment (control group N=5). LDLR-saRNA used for this study is the same as Example 4.

[0655] LDLR-saRNA reconstituted with 100 μL of RNase/Dnase free H20; 50 μL of complex A and 50 μL of complex B (InvivoFectamine, Invitrogen, CA, USA) are mixed, incubated at 50° C. for 30 minutes and are used for tail vein injections. Control animals are injected with equal volume of PBS while a positive control animal received siRNA against LDLR; a total of 5 control and 5 experimental animals are injected.

[0656] Tissue sample are analyzed for LDLR mRNA levels and mRNA levels of other genes. The administration of LDLR-saRNA using a dendrimer delivery vehicle to a mouse leads to a significant increase in LDLR within the blood circulation. LDLR-saRNA also modulates the expression of other genes.

### Example 6

### LDLR-saRNA Regulates Cholesterol, HDL and LDL Levels In Vitro

[0657] LDLR-saRNA is administered to mice in 0.1 nmol/uL standard dose, 2× doses, and 3× doses. Cholesterol, HDL and LDL levels in blood are measured. Dose increase of LDLR-saRNA altered circulating levels of cholesterol, HDL and LDL.

### Example 7

### Upregulation of HNF4A Expression Through Transfection with its saRNA In Vitro

[0658] 20 nM, 50 nM or 100 nM of saRNA of HNF4A-saRNA is transfected onto a monolayer of cells using lipofectamine 2000 (Life Technologies, US) following the manufacturer's instructions. The saRNA may be single stranded or double-stranded. The cells may be HepG2 cells. This process is repeated three times before cells are harvested for isolation of total RNA for mRNA analysis.

[0659] After transfection, the isolation of total RNA is performed using the RNAqueous-Micro kit (Ambion, UK) following the manufacturer's instructions. Briefly, the cells are gently centrifuged followed by 3 pulses of sonication at Output 3 in lysis buffer (AMBION, UK). The cell lysates are then processed through an RNA binding column, followed by multiple washes and elution. The total RNA isolated is quantified by a NANODROP 2000 spectrophotometer. 500 ng of total extracted RNA is processed for elimination of genomic DNA followed by reverse transcription using the QUANTITECT® Reverse Transcription kit from QIAGEN.

[0660] The isolated RNA extracts are analyzed using quantitative reverse transcriptase (qRT-PCR). Briefly, the extracts are reverse transcribed using First Strand cDNA synthesis kit (Qiagen). The cDNA is then amplified for quantitative analysis using QuantiFast® SYBR® Green PCT Kit from Qiagen. Amplification is performed using Applied Biosystems 7900HT FAST-Real-Time System. Amplified products are then analyzed using Applied Biosystems RQ Manager 1.2.1. 5 independent experiments are amplified in triplicates for quantitative analysis. Student T-Test scoring is performed at 99% confidence intervals.

[0661] mRNA production of the target gene is determined within the cells through the use of ELISA. Briefly, the cells are grown in phenol-red free RPMI media in the presence of charcoal stripped FCS. Following three sets of saRNA transfections at 8 hrs, 16 hrs and 24 hrs, the culture media is collected for total ELISA.

[0662] An increase in mRNA levels only occurred in cells transfected with saRNAs, not in control cells transfected with scramble saRNA.

### Example 8

### Upregulation of HNF4A Expression Through the Transfection with saRNA in Mouse in Vivo

[0663] Ten male C57BI6/J, 8 week old mice are used for the experiment (control group N=5).

[0664] saRNA of the HNF4A reconstituted with 100 μL of RNase/Dnase free H20; 50 μL of complex A and 50 μL of complex B (InvivoFectamine, Invitrogen, CA, USA) are mixed, incubated at 50° C. for 30 minutes and are used for tail vein injections. Control animals are injected with equal volume of PBS while a positive control animal received siRNA against the target gene; a total of 5 control and 5 experimental animals are injected.

[0665] After administration, the total RNA is isolated. Frozen tissue sections from the mice are placed into scintillation vials containing Trizol and homogenised for 30 seconds. The tissue may be from the liver of the mice. The homogenate is then transferred in Falcon tubes for a further 2 minutes of homogenisation. Chloroform is then added to this and mixed by vortexing followed by a centrifugation step at 12,000 rpm for 15 minutes at 4° C. The aqueous upper phase is then transferred into a fresh microfuge tube where RNA is precipitated using 5 mg/ml of linear acrylamide (Ambion) and isopropanol overnight at −20° C. The RNA is pelleted by centrifugation at 12,000 rpm for 15 minutes at 4° C. and washed with ice cold 70% ethanol. The RNA is pelleted again at 7,500 rpm for 5 minutes at 4° C. The supernatant is removed immediately and the RNA pellet allowed to air dry. The RNA is dissolved in nuclease free water for immediate analysis for RNA integrity using a Bionanalyser.

[0666] The isolated RNA is analyzed using qRT-PCR as described in Example 7. mRNA production of the target gene is determined using an ELISA as described in Example 7. The administration of saRNA using a dendrimer delivery vehicle to a mouse leads to a significant increase in the mRNA encoded by the target gene within the blood circulation.

[0667] The effects of administration of saRNA on overall mice organ function may be studied. As a non-limiting example, the effects of administration of saRNA on overall liver function are determined according to the liver function markers gamma glutamyl transpeptidase, alanine aminotransferase, and aspartate aminotransferase or bilirubin.

[0668] saRNA also affects other the expression of other genes according to the mRNA levels of these genes. Tissue samples from the treated mice are used to measure the expression levels of various genes. The mRNA transcript levels of these genes are measured by RT-PCT mRNA expression level.

### Example 9

### Upregulation of a Target Gene Expression Through Transfection with its saRNA In Vitro

[0669] 20 nM, 50 nM or 100 nM of saRNA of an saRNA for a target gene is transfected onto a monolayer of cells using lipofectamine 2000 (Life Technologies, US) following the manufacturer's instructions. The target genes may be DMD, PAX5, SCN1A, IDUA, FNDC5, FOXA2, FOXP3, HNF4A, IFNG, IL10, IL2, LMXIA, METRNL, NR4A2, SIRTI, TH, EPO, CDKNIB, MDM2, IL119, C19orf90, F7, or F8. The saRNA may be single stranded or double-stranded. The cells may be HepG2 cells. This process is repeated three times before cells are harvested for isolation of total RNA for mRNA analysis.

[0670] After transfection, the isolation of total RNA is performed using the RNAqueous-Micro kit (Ambion, UK) following the manufacturer's instructions. Briefly, the cells are gently centrifuged followed by 3 pulses of sonication at Output 3 in lysis buffer (AMBION, UK). The cell lysates are then processed through an RNA binding column, followed by multiple washes and elution. The total RNA isolated is quantified by a NANODROP 2000 spectrophotometer. 500 ng of total extracted RNA is processed for elimination of genomic DNA followed by reverse transcription using the QUANTITECT® Reverse Transcription kit from QIAGEN.

[0671] The isolated RNA extracts are analyzed using quantitative reverse transcriptase (qRT-PCR). Briefly, the extracts are reverse transcribed using First Strand cDNA synthesis kit (Qiagen). The cDNA is then amplified for quantitative analysis using QuantiFast® SYBR® Green PCT Kit from Qiagen. Amplification is performed using Applied Biosystems 7900HT FAST-Real-Time System. Amplified products are then analyzed using Applied Biosystems RQ Manager 1.2.1. 5 independent experiments are amplified in triplicates for quantitative analysis. Student T-Test scoring is performed at 99% confidence intervals.

[0672] mRNA production of the target gene is determined within the cells through the use of ELISA. Briefly, the cells are grown in phenol-red free RPMI media in the presence of charcoal stripped FCS. Following three sets of saRNA transfections at 8 hrs, 16 hrs and 24 hrs, the culture media is collected for total ELISA.

[0673] An increase in mRNA levels only occurred in cells transfected with saRNAs, not in control cells transfected with scramble saRNA.

### Example 10

### Upregulation of Target Gene Expression Through the Transfection with saRNA in Mouse In Vivo

[0674] Ten male C57BI6/J, 8 week old mice are used for the experiment (control group N=5). The target genes may be DMD, PAX5, SCN1A, IDUA, FNDC5, FOXA2, FOXP3, HNF4A, IFNG, IL10, IL2, LMXIA, METRNL, NR4A2, SIRTI, TH, EPO, CDKNIB, MDM2, IL19, C19orf90, F7, or F8.

[0675] saRNA of the target gene reconstituted with 100 μL of RNase/Dnase free H20; 50 μL of complex A and 50 μL of complex B (InvivoFectamine, Invitrogen, CA, USA) are mixed, incubated at 50° C. for 30 minutes and are used for tail vein injections. Control animals are injected with equal volume of PBS while a positive control animal received siRNA against the target gene; a total of 5 control and 5 experimental animals are injected.

[0676] After administration, the total RNA is isolated. Frozen tissue sections from the mice are placed into scintillation vials containing Trizol and homogenised for 30 seconds. The tissue may be from the liver of the mice. The homogenate is then transferred in Falcon tubes for a further 2 minutes of homogenisation. Chloroform is then added to this and mixed by vortexing followed by a centrifugation step at 12,000 rpm for 15 minutes at 4° C. The aqueous upper phase is then transferred into a fresh microfuge tube where RNA is precipitated using 5 mg/ml of linear acrylamide (Ambion) and isopropanol overnight at −20° C. The RNA is pelleted by centrifugation at 12,000 rpm for 15 minutes at 4° C. and washed with ice cold 70% ethanol. The RNA is pelleted again at 7,500 rpm for 5 minutes at 4° C. The supernatant is removed immediately and the RNA pellet allowed to air dry. The RNA is dissolved in nuclease free water for immediate analysis for RNA integrity using a Bionanalyser.

[0677] The isolated RNA is analyzed using qRT-PCR as described in Example 9. mRNA production of the target gene is determined using an ELISA as described in Example 9. The administration of saRNA using a dendrimer delivery vehicle to a mouse leads to a significant increase in the mRNA encoded by the target gene within the blood circulation.

[0678] The effects of administration of saRNA on overall mice organ function may be studied. As a non-limiting example, the effects of administration of saRNA on overall liver function are determined according to the liver function markers gamma glutamyl transpeptidase, alanine aminotransferase, and aspartate aminotransferase or bilirubin.

[0679] saRNA also affects other the expression of other genes according to the mRNA levels of these genes. Tissue samples from the treated mice are used to measure the expression levels of various genes. The mRNA transcript levels of these genes are measured by RT-PCT mRNA expression level.

### Other Embodiments

[0680] It is to be understood that while the present disclosure has been described in conjunction with the detailed description thereof, the foregoing description is intended to illustrate and not limit the scope of the present disclosure, which is defined by the scope of the appended claims. Other aspects, advantages, and modifications are within the scope of the following claims.

The application's sequence listing, which the Patent Office published only in electronic form, follows.

SEQUENCE LISTING (5790 sequences)

SEQ ID NO: 1 - DNA, 897 bp, Homo sapiens
agagactgcgagaaggaggtcccccacggcccttcaggatgaaagctgcggtgctgaccttggccgtgctcttcctgacggggagccaggctcggcatttctggcagcaagatgaacccccccagagcccctgggatcgagtgaaggacctggccactgtgtacgtggatgtgctcaaagacagcggcagagactatgtgtcccagtttgaaggctccgccttgggaaaacagctaaacctaaagctccttgacaactgggacagcgtgacctccaccttcagcaagctgcgcgaacagctcggccctgtgacccaggagttctgggataacctggaaaaggagacagagggcctgaggcaggagatgagcaaggatctggaggaggtgaaggccaaggtgcagccctacctggacgacttccagaagaagtggcaggaggagatggagctctaccgccagaaggtggagccgctgcgcgcagagctccaagagggcgcgcgccagaagctgcacgagctgcaagagaagctgagcccactgggcgaggagatgcgcgaccgcgcgcgcgcccatgtggacgcgctgcgcacgcatctggccccctacagcgacgagctgcgccagcgcttggccgcgcgccttgaggctctcaaggagaacggcggcgccagactggccgagtaccacgccaaggccaccgagcatctgagcacgctcagcgagaaggccaagcccgcgctcgaggacctccgccaaggcctgctgcccgtgctggagagcttcaaggtcagcttcctgagcgctctcgaggagtacactaagaagctcaacacccagtgaggcgcccgccgccgccccccttcccggtgctcagaataaacgtttccaaagtggg

SEQ ID NO: 2 - DNA, 988 bp, Mus musculus
agggccaggctgagcttatcagtctcccagcccagcccctgcccacacacatatatagaccagggaagaagagctggacacccagactgtcggagagctccggggaggtcacccacacccttcaggatgaaagctgtggtgctggccgtggctctggtcttcctgacagggagccaggcttggcacgtatggcagcaagatgaaccccagtcccaatgggacaaagtgaaggatttcgctaatgtgtatgtggatgcggtcaaagacagcggcagagactatgtgtcccagtttgaatcctcctccttgggccaacagctgaacctgaatctcctggaaaactgggacactctgggttcaaccgttagtcagctgcaggaacggctgggcccattgactcgggacttctgggataacctggagaaagaaacagattgggtgagacaggagatgaacaaggacctagaggaagtgaaacagaaggtgcagccctacctggacgaattccagaagaaatggaaagaggatgtggagctctaccgccagaaggtggcgcctctgggcgccgagctgcaggagagcgcgcgccagaagctgcaggagctgcaagggagactgtcccctgtggctgaggaatttcgcgaccgcatgcgcacacacgtagactctctgcgcacacagctagcgccccacagcgaacagatgcgcgagagcctggcccagcgcctggctgagctcaagagcaaccctaccttgaacgagtaccacaccagggccaaaacccacctgaagacacttggcgagaaagccagacctgcgctggaggacctgcgccatagtctgatgcccatgctggagacgcttaagacccaagtccagagtgtgatcgacaaggccagcgagactctgactgcccagtgaggtgcccgcttccactccccacccccgcattggctttcttacaataaacctttccaaaatggaatag

SEQ ID NO: 3 - DNA, 889 bp, Rattus norvegicus
agactgttggagagctccgggggaggtcgccacatccttcaggatgaaagctgcagtgttggctgtggccctggtcttcctgacaggttgccaagcttgggagttctggcagcaagatgagccccagtcccaatgggacagggtgaaggatttcgccactgtgtatgtggatgcagtcaaggacagcggcagagactatgtgtcccagtttgaatcctccactttgggcaaacagctgaacctgaatctcctggacaactgggacactctgggttcaactgttggtcgcctacaggaacagctaggcccagtgactcaggagttctgggctaacctggagaaagaaacagattggctgagaaacgagatgaacaaggacctggagaatgtgaaacagaagatgcagccccacctggatgaattccaggagaagtggaacgaggaggtcgaggcctaccgccagaagctggagcctctgggcaccgagcttcacaaaaacgcgaaggagatgcaaaggcatctaaaggttgtggccgaggagtttcgagaccgcatgcgtgtgaatgcagacgcgctgcgcgcaaagtttgggctctacagcgatcagatgcgcgagaacctggcccagcgcctgaccgagatcaagaaccaccctaccctgatcgagtatcataccaaggccagcgaccacctgaagacacttggtgagaaagccaaacccgcgctggatgacctgggccagggcctgatgccggtgctggaagcctggaaggccaaaatcatgagtatgatcgatgaggccaaaaagaagctgaacgcttagtgaggcgcccgtcaccactccccacccctgaattggctttcttacaataaacgtttccaaagtggg

SEQ ID NO: 4 - DNA, 5292 bp, Homo sapiens
ctcttgcagtgaggtgaagacatttgaaaatcaccccactgcaaactcctccccctgctagaaacctcacattgaaatgctgtaaatgacgtgggccccgagtgcaatcgcgggaagccagggtttccagctaggacacagcaggtcgtgatccgggtcgggacactgcctggcagaggctgcgagcatggggccctggggctggaaattgcgctggaccgtcgccttgctcctcgccgcggcggggactgcagtgggcgacagatgcgaaagaaacgagttccagtgccaagacgggaaatgcatctcctacaagtgggtctgcgatggcagcgctgagtgccaggatggctctgatgagtcccaggagacgtgcttgtctgtcacctgcaaatccggggacttcagctgtgggggccgtgtcaaccgctgcattcctcagttctggaggtgcgatggccaagtggactgcgacaacggctcagacgagcaaggctgtccccccaagacgtgctcccaggacgagtttcgctgccacgatgggaagtgcatctctcggcagttcgtctgtgactcagaccgggactgcttggacggctcagacgaggcctcctgcccggtgctcacctgtggtcccgccagcttccagtgcaacagctccacctgcatcccccagctgtgggcctgcgacaacgaccccgactgcgaagatggctcggatgagtggccgcagcgctgtaggggtctttacgtgttccaaggggacagtagcccctgctcggccttcgagttccactgcctaagtggcgagtgcatccactccagctggcgctgtgatggtggccccgactgcaaggacaaatctgacgaggaaaactgcgctgtggccacctgtcgccctgacgaattccagtgctctgatggaaactgcatccatggcagccggcagtgtgaccgggaatatgactgcaaggacatgagcgatgaagttggctgcgttaatgtgacactctgcgagggacccaacaagttcaagtgtcacagcggcgaatgcatcaccctggacaaagtctgcaacatggctagagactgccgggactggtcagatgaacccatcaaagagtgcgggaccaacgaatgcttggacaacaacggcggctgttcccacgtctgcaatgaccttaagatcggctacgagtgcctgtgccccgacggcttccagctggtggcccagcgaagatgcgaagatatcgatgagtgtcaggatcccgacacctgcagccagctctgcgtgaacctggagggtggctacaagtgccagtgtgaggaaggcttccagctggacccccacacgaaggcctgcaaggctgtgggctccatcgcctacctcttcttcaccaaccggcacgaggtcaggaagatgacgctggaccggagcgagtacaccagcctcatccccaacctgaggaacgtggtcgctctggacacggaggtggccagcaatagaatctactggtctgacctgtcccagagaatgatctgcagcacccagcttgacagagcccacggcgtctcttcctatgacaccgtcatcagcagagacatccaggcccccgacgggctggctgtggactggatccacagcaacatctactggaccgactctgtcctgggcactgtctctgttgcggataccaagggcgtgaagaggaaaacgttattcagggagaacggctccaagccaagggccatcgtggtggatcctgttcatggcttcatgtactggactgactggggaactcccgccaagatcaagaaagggggcctgaatggtgtggacatctactcgctggtgactgaaaacattcagtggcccaatggcatcaccctagatctcctcagtggccgcctctactgggttgactccaaacttcactccatctcaagcatcgatgtcaacgggggcaaccggaagaccatcttggaggatgaaaagaggctggcccaccccttctccttggccgtctttgaggacaaagtattttggacagatatcatcaacgaagccattttcagtgccaaccgcctcacaggttccgatgtcaacttgttggctgaaaacctactgtccccagaggatatggttctcttccacaacctcacccagccaagaggagtgaactggtgtgagaggaccaccctgagcaatggcggctgccagtatctgtgcctccctgccccgcagatcaacccccactcgcccaagtttacctgcgcctgcccggacggcatgctgctggccagggacatgaggagctgcctcacagaggctgaggctgcagtggccacccaggagacatccaccgtcaggctaaaggtcagctccacagccgtaaggacacagcacacaaccacccgacctgttcccgacacctcccggctgcctggggccacccctgggctcaccacggtggagatagtgacaatgtctcaccaagctctgggcgacgttgctggcagaggaaatgagaagaagcccagtagcgtgagggctctgtccattgtcctccccatcgtgctcctcgtcttcctttgcctgggggtcttccttctatggaagaactggcggcttaagaacatcaacagcatcaactttgacaaccccgtctatcagaagaccacagaggatgaggtccacatttgccacaaccaggacggctacagctacccctcgagacagatggtcagtctggaggatgacgtggcgtgaacatctgcctggagtcccgtccctgcccagaacccttcctgagacctcgccggccttgttttattcaaagacagagaagaccaaagcattgcctgccagagctttgttttatatatttattcatctgggaggcagaacaggcttcggacagtgcccatgcaatggcttgggttgggattttggtttcttcctttcctcgtgaaggataagagaaacaggcccggggggaccaggatgacacctccatttctctccaggaagttttgagtttctctccaccgtgacacaatcctcaaacatggaagatgaaaggggaggggatgtcaggcccagagaagcaagtggctttcaacacacaacagcagatggcaccaacgggaccccctggccctgcctcatccaccaatctctaagccaaacccctaaactcaggagtcaacgtgtttacctcttctatgcaagccttgctagacagccaggttagcctttgccctgtcacccccgaatcatgacccacccagtgtctttcgaggtgggtttgtaccttccttaagccaggaaagggattcatggcgtcggaaatgatctggctgaatccgtggtggcaccgagaccaaactcattcaccaaatgatgccacttcccagaggcagagcctgagtcactggtcacccttaatatttattaagtgcctgagacacccggttaccttggccgtgaggacacgtggcctgcacccaggtgtggctgtcaggacaccagcctggtgcccatcctcccgacccctacccacttccattcccgtggtctccttgcactttctcagttcagagttgtacactgtgtacatttggcatttgtgttattattttgcactgttttctgtcgtgtgtgttgggatgggatcccaggccagggaaagcccgtgtcaatgaatgccggggacagagaggggcaggttgaccgggacttcaaagccgtgatcgtgaatatcgagaactgccattgtcgtctttatgtccgcccacctagtgcttccacttctatgcaaatgcctccaagccattcacttccccaatcttgtcgttgatgggtatgtgtttaaaacatgcacggtgaggccgggcgcagtggctcacgcctgtaatcccagcactttgggaggccgaggcgggtggatcatgaggtcaggagatcgagaccatcctggctaacacgtgaaaccccgtctctactaaaaatacaaaaaattagccgggcgtggtggcgggcacctgtagtcccagctactcgggaggctgaggcaggagaatggtgtgaacccgggaagcggagcttgcagtgagccgagattgcgccactgcagtccgcagtctggcctgggcgacagagcgagactccgtctcaaaaaaaaaaaacaaaaaaaaaccatgcatggtgcatcagcagcccatggcctctggccaggcatggcgaggctgaggtgggaggatggtttgagctcaggcatttgaggctgtcgtgagctatgattatgccactgctttccagcctgggcaacatagtaagaccccatctcttaaaaaatgaatttggccagacacaggtgcctcacgcctgtaatcccagcactttgggaggctgagctggatcacttgagttcaggagttggagaccaggcctgagcaacaaagcgagatcccatctctacaaaaaccaaaaagttaaaaatcagctgggtacggtggcacgtgcctgtgatcccagctacttgggaggctgaggcaggaggatcgcctgagcccaggaggtggaggttgcagtgagccatgatcgagccactgcactccagcctgggcaacagatgaagaccctatttcagaaatacaactataaaaaaataaataaatcctccagtctggatcgtttgacgggacttcaggttctttctgaaatcgccgtgttactgttgcactgatgtccggagagacagtgacagcctccgtcagactcccgcgtgaagatgtcacaagggattggcaattgtccccagggacaaaacactgtgtcccccccagtgcagggaaccgtgataagcctttctggtttcggagcacgtaaatgcgtccctgtacagatagtggggattttttgttatgtttgcactttgtatattggttgaaactgttatcacttatatatatatatatacacacatatatataaaatctatttatttttgcaaaccctggttgctgtatttgttcagtgactattctcggggccctgtgtagggggttattgcctctgaaatgcctcttctttatgtacaaagattatttgcacgaactggactgtgtgcaacgctttttgggagaatgatgtccccgttgtatgtatgagtggcttctgggagatgggtgtcactttttaaaccactgtatagaaggtttttgtagcctgaatgtcttactgtgatcaattaaatttcttaaatgaaccaatttgtctaaaaaaaaaaa

SEQ ID NO: 5 - DNA, 4549 bp, Mus musculus
gcagactcctcccccgcctggaaacctcgcccctagtactgggaatgactctgggcgtgcggcgtagtttgcagccgggacaccgtgaggcttgcgagcccagattcgcagccgagacaccgtggggcccgcgatccagtgtttgcagcgggaacatttcggggtctgtgatccgagtgaggacgcaacgcagaagctaaggatgagcaccgcggatctgatgcgtcgctgggtcatcgccctgctcctggctgctgccggagttgcagcagaagactcatgcagcaggaacgagttccagtgtagagacggaaaatgcatcgctagcaagtgggtgtgcgatggcagccccgagtgcccggatggctccgatgagtccccagagacatgcatgtctgtcacctgtcagtccaatcaattcagctgtggaggccgtgtcagccgatgcattcctgactcctggagatgtgatggacaggtagactgtgaaaatgactcagacgaacaaggctgtccccccaagacgtgctcccaggatgacttccgatgccaggatggcaagtgcatctccccgcagtttgtgtgtgatggagaccgagattgcctagatggctctgatgaggcccactgccaggccaccacttgtggccccgcccacttccgctgcaactcatccatatgcatccccagtctttgggcctgcgacggggatgtcgactgtgttgacggctccgatgagtggccacagaactgccagggccgagacacggcctccaaaggcgttagcagcccctgctcctccctggagttccactgtggtagcagtgagtgtatccatcgcagctgggtctgtgacggcgaggcagactgcaaggacaagtcagatgaggagcactgcgcggtggccacctgccgacctgatgaattccagtgtgcagatggctcctgcattcacggtagccgccagtgtgaccgtgaacatgactgcaaggacatgagcgacgagctcggctgcgtcaatgtgacacagtgtgatggccccaacaagttcaagtgtcacagtggggagtgcatcagcttggacaaggtgtgcgactccgcccgcgactgccaggactggtcggatgagcccatcaaggagtgcaagaccaacgagtgtttggacaacaatggtggctgttcccacatctgcaaggacctcaagattggctctgagtgcctgtgtcccagcggcttccggttggtggacctccacaggtgtgaagatattgacgagtgtcaggagccagacacctgcagccagctctgtgtgaacctggaaggcagctacaagtgtgagtgccaggccggcttccacatggacccacacaccagggtctgcaaggctgtgggctccataggctatctgctcttcaccaaccgccacgaggtccggaagatgaccctggaccgcagcgagtacaccagtctgctccccaacctgaagaatgtggtggctctcgacacggaggtgaccaacaatagaatctactggtccgacctgtcccaaaaaaagatctacagcgccctgatggaccaggcccctaacttgtcctacgacaccatcatcagtgaggacctgcatgcccctgacgggctggcggtagactggatccaccgcaacatctactggacagattcagtcccaggcagcgtatctgtggctgacaccaagggcgtaaagaggaggacactgttccaagaggcagggtccagacccagagccatcgtagtggaccctgtgcatggcttcatgtactggacagattggggaacacccgccaagatcaagaaagggggtttgaatggtgtggacatccactcactggtgaccgaaaacatccagtggccaaatggcatcacactagatctttccagtggccgtctctattgggttgattccaaactccactctatctccagcatcgatgtcaatgggggcaatcggaaaaccattttggaggatgagaaccggctggcccaccccttctccttggccatctatgaggacaaagtgtattggacagatgtcataaacgaagccattttcagtgccaatcgactcacgggttcagatgtgaatttggtggctgaaaacctcttgtccccggaggacattgtcctgttccacaaggtcacacagcctagaggggtgaactggtgtgagacaacagccctcctccccaatggtggttgccagtacctgtgcctgcccgccccacagatcggtccccactcgcccaaattcacctgcgcctgccctgatggcatgctgctggccaaggacatgcggagctgcctcacagaagtcgacactgtactgaccacccaggggacatccgccgtccggcctgtggtcaccgcatcagctaccaggccaccgaagcacagtgaggatctctcagctcccagtactcctaggcagcctgtggacaccccagggctcagcacagtggcgtcagtgacagtgtcccaccaagtccagggtgacatggctggcagagggaatgaggagcagccacatggtatgaggttcctgtccatcttcttccctattgcactggttgccctccttgtccttggggccgtcctgctgtggaggaactggcggctgaagaacatcaacagcataaactttgacaacccagtctaccagaagaccacagaggacgagctccacatttgccgaagccaggatggctatacctacccctcaagacagatggtcagcctggaggacgatgtggcatgagcagccgggagagccgtctctttccgggatccattgccaagcttaggcagaaaagacactctctccagacctccccatccagcactggtcctgccacctccctgggctctgtgttgctcaaagcaagataagagcaaagctgggctgggggccaagctcagctgcctgtctgccccaggttctgttttatatatttattgtctggggacagaaaaggctactggctgtgcttgaaattcgaattctgcctgggaatttttttttttctcccatcttcatttccttggaagccaaataggctgtcccagaagcttctgaattctactcttttcaacactaacacggaggaggaagagacccacccaggcagagagaagcctgctggacatgagacagcaggtactactgaccgggtcctgggtaccatagccagtccctaacctcaggacttcctgcattgaccttcatcccagagccttcctgcctgactctgccgcccccatcagaagccaggaaagtgactcgtgacattcggtactgatcttgctggatcttgaggccggcagctgccagtgatggatacccgctcatgcctttgccaaaacgtcacccgttcctggagggacaagcccaagtcgccattctcccttaatatttatcaagtgcctgagacaactggttgccttgctcaggagtcctggcctgctcagtgtcctgctgctcaggggtggccggcaggacccctgtcctgtgcccagcccccgagtctccgagtgaggcttgcacttctctctgcgcacttttcccgttctgtgctgggcacccacgtggtccacatttgtactcctaggttgcactgaccctggtgcattggatgggacctcaggccggaagtggccccgaatcattgaccacagaagataattgccaggctccaagcatccattgccttcttcagtactggggggaactcagggcctctgtctggtgtttagttagtctgtttgtttgtttgtttgtttgtttgtttggtggtttctggctctgcacagcagagttgtttagctcctctggtaacgtcatcctctctcacagagacatccagcctgctgaaggggagagatggggcgaggggagggatacacgcatggtttctcaggtgtggtggcacttggctttaatcctatgctcaagaggaagaggtgggcacatgtctgaggtccaagcctacatagtgagaccttatatatctaaaaaccaaaagaaatcccagactatttggtgggacttggaagaatacttagaaattgccacagatttgtcacatgggtaacctaagaagacagtggtggccttacttggattcctgggtagatccacctgtccactactcaagacacaagggcacactgcccagcccactgggacacttgtaaagagctctgtaatgtgccgatggcacctggctcggttttcattctgtatattcaaggatatcacacatatgtattaaatctatttatttttgcaaaccctgattgctgcacctctctgcaatttctccaggttaggctggggtgatactctgggatgctctgtatacaaagatgatttgaatgggctgatctcaggcctgtcctgtgcgttgctttgagtgggtgggaactgctttgaaacccttgttcagatgtttttataggctgaaaatatcatactgtgatggattaaattcttttttggaaaaaaaaaaaaaaaaaa

SEQ ID NO: 6 - DNA, 3037 bp, Rattus norvegicus
ttgacccagtgcggcgtaggattgcagcccgcatacctggggcttgccacccaggttttgcagctgagacaccgtgggacccgtgatcctgtgtttgcagcgggaacatttcgggtctgtgatccgagtggggacgcgacgcagaggctgaggatgagcaccgcggatctgatgctacgctgggccatcgccctgctcctggctgctgctggagttgcagcagaagattcatgtggcaagaacgagttccagtgtagagacggaaaatgcatcgtcagcaagtgggtgtgtgacggcagccgcgagtgcccggatggctccgatgagtcccctgagacatgcatgtctgtcacctgtcgatccggtgagttcagctgtggaggccgcgtcagccgatgcattcctgactcctggagatgtgatgggcggaccgactgtgaaaatggctcggatgaactagactgctcccccaagacgtgctccctggatgagttccgctgccaggatggcaagtgcatctcccggcagtttgtgtgtgaccaagactgggattgcctggatggctctgacgaggcccactgtgcggccaccacttgtggccctgctcacttccgctgcaactcctcttcctgcatccccagcctgtgggcctgcgacggggaccgggactgtgacgatggctccgatgagtggccgcagaactgcggggccgaagacacggccgctgaggtggtcagcagcccctgctcctccctcgagttccactgtggcagtagtgagtgtatccatcgcagctgggtctgtgacggtgcggctgactgcaaggacaagtcggacgaggagaactgcgcggtgaccacctgccgacctgacgaattccagtgtgcagatggctcctgtattcacggtagccgccagtgtgaccgtgaacatgactgcaaagacatgagcgacgagcttggctgcatcaatgtgacccagtgcgatggccctaacaaattcaagtgccacagtggggagtgcatcagcttggacaaggtgtgcaactccgcccgggactgtcgtgactggtcggatgagcccatcaaggagtgcaagaccaacgagtgcttggacaacaatggtggctgttcccacatctgcaaggacctcaagattggctatgagtgcctatgtcccagcggtttccggttggtggacggccaccagtgtgaagatattgacgagtgtcaggagccagacacctgcagccagctctgtgtgaacctggagggcagcttcaagtgcgagtgtcgggccggcttccacatggaccctcacaccagggtctgcaaggctgtgggttccatagggtttctgctcttcaccaaccgccatgaggtacgtaagatgaccctggaccgcagcgagtataccagcctgatccccaacctgaagaatgtggtggcgctggacactgaggtggccaacaatagaatttactggtctgacctgtcccagagaaagatctacagcgccgtgatggaccagggcaccagcttgtcctatgatgccatcatcagtggggacctgcacgcccctgacgggctggcggtagactggatccatggcaacatctactggacggattcagttccgggcactgtttccgtggctgacaccaagggtgtcaggaggagaactctgttccgagagaaagggtccagacccagagccatcgtagtggaccctgtgcatggcttcatgtactggacagattgggggacacctgccaagatcaagaaagggggtttgaatggtgtagacatctactctctggtgaccgaggacatccagtggccaaatggcatcacactagatcttcccagtggccgcctctattgggttgattccaaactccactccatctccagcatcgatgtcaatgggggtggtcggaaaaccattttggaggatgagaagcagctagctcaccccttctccttggccatctatgaggacaaagtgtattggacagatgtcttaaatgaagccattttcagtgccaaccgcctcacgggttcagatgtgaatttggtggctaaaaacctcatgtccccggaggacattgtcctgtttcacaacgtcacgcagcctagaggggtaaactggtgtgaggcaacggttctccccaacggtggctgccagtacatgtgcctgcctgcccctcagatcagtgcccactcacccaagttcacctgcgcttgccctgatggtatgctactggccaaggacatgaggagctgcctcccagaagtcgacactgtaccgaccacccaggggacatccaccattgggcctgtggtcaccacatcagctgctgtgtcactgaagcgcaaggaggatccctcagctactaggcacaaggaggatccctcagctactaggcacaatgaggatccctcagctaccagcacctctaggcagcctggggataccccagagctcagcacagtggagtcggtgacagtgtcctcccaagtccaaggtgacatggctggcagaggggacgaggtgcagcggcacggtgtggggttcttgtccatcttcctccccattgcactggtggccctccttgtcttcggagccatcctcctgtggaggaactggcggctgaggaacattaacagcataaactttgacaacccagtctaccagaagaccacggaggacgagatccacatttgccgcagccaggatggctatacctacccctcgagacagatggtcagcctggaggatgatgtggcatgaacagctgaggggagccatctctttccgggatccgctgccacccttaggcaggaaggacgctttctcacacctccccgccctgcactggtccttccacctcagtggtctctgtgttgctcaaagcaagataagagcaaaactgggctggggccaagctcagcggcctgtctgccctgggtcctgttttatatatttattgtctggggacagaaaaggctactggccatgctccagatgggaattc

SEQ ID NO: 7 - protein, 267 aa, Homo sapiens
MKAAVLTLAVLFLTGSQARHFWQQDEPPQSPWDRVKDLATVYVDVLKDSGRDYVSQFEGSALGKQLNLKLLDNWDSVTSTFSKLREQLGPVTQEFWDNLEKETEGLRQEMSKDLEEVKAKVQPYLDDFQKKWQEEMELYRQKVEPLRAELQEGARQKLHELQEKLSPLGEEMRDRARAHVDALRTHLAPYSDELRQRLAARLEALKENGGARLAEYHAKATEHLSTLSEKAKPALEDLRQGLLPVLESFKVSFLSALEEYTKKLNTQ

SEQ ID NO: 8 - protein, 264 aa, Mus musculus
MKAVVLAVALVFLTGSQAWHVWQQDEPQSQWDKVKDFANVYVDAVKDSGRDYVSQFESSSLGQQLNLNLLENWDTLGSTVSQLQERLGPLTRDFWDNLEKETDWVRQEMNKDLEEVKQKVQPYLDEFQKKWKEDVELYRQKVAPLGAELQESARQKLQELQGRLSPVAEEFRDRMRTHVDSLRTQLAPHSEQMRESLAQRLAELKSNPTLNEYHTRAKTHLKTLGEKARPALEDLRHSLMPMLETLKTQVQSVIDKASETLTAQ

SEQ ID NO: 9 - protein, 259 aa, Rattus norvegicus
MKAAVLAVALVFLTGCQAWEFWQQDEPQSQWDRVKDFATVYVDAVKDSGRDYVSQFESSTLGKQLNLNLLDNWDTLGSTVGRLQEQLGPVTQEFWANLEKETDWLRNEMNKDLENVKQKMQPHLDEFQEKWNEEVEAYRQKLEPLGTELHKNAKEMQRHLKVVAEEFRDRMRVNADALRAKFGLYSDQMRENLAQRLTEIKNHPTLIEYHTKASDHLKTLGEKAKPALDDLGQGLMPVLEAWKAKIMSMIDEAKKKLNA

SEQ ID NO: 10 - protein, 860 aa, Homo sapiens [sequence omitted]

SEQ ID NO: 11 - protein, 862 aa, Mus musculus
MSTADLMRRWVIALLLAAAGVAAEDSCSRNEFQCRDGKCIASKWVCDGSPECPDGSDESPETCMSVTCQSNQFSCGGRVSRCIPDSWRCDGQVDCENDSDEQGCPPKTCSQDDFRCQDGKCISPQFVCDGDRDCLDGSDEAHCQATTCGPAHFRCNSSICIPSLWACDGDVDCVDGSDEWPQNCQGRDTASKGVSSPCSSLEFHCGSSECIHRSWVCDGEADCKDKSDEEHCAVATCRPDEFQCADGSCIHGSRQCDREHDCKDMSDELGCVNVTQCDGPNKFKCHSGECISLDKVCDSARDCQDWSDEPIKECKTNECLDNNGGCSHICKDLKIGSECLCPSGFRLVDLHRCEDIDECQEPDTCSQLCVNLEGSYKCECQAGFHMDPHTRVCKAVGSIGYLLFTNRHEVRKMTLDRSEYTSLLPNLKNVVALDTEVTNNRIYWSDLSQKKIYSALMDQAPNLSYDTIISEDLHAPDGLAVDWIHRNIYWTDSVPGSVSVADTKGVKRRTLFQEAGSRPRAIVVDPVHGFMYWTDWGTPAKIKKGGLNGVDIHSLVTENIQWPNGITLDLSSGRLYWVDSKLHSISSIDVNGGNRKTILEDENRLAHPFSLAIYEDKVYWTDVINEAIFSANRLTGSDVNLVAENLLSPEDIVLFHKVTQPRGVNWCETTALLPNGGCQYLCLPAPQIGPHSPKFTCACPDGMLLAKDMRSCLTEVDTVLTTQGTSAVRPVVTASATRPPKHSEDLSAPSTPRQPVDTPGLSTVASVTVSHQVQGDMAGRGNEEQPHGMRFLSIFFPIALVALLVLGAVLLWRNWRLKNINSINFDNPVYQKTTEDELHICRSQDGYTYPSRQMVSLEDDVA

SEQ ID NO: 12 - protein, 879 aa, Rattus nornegicus
MSTADLMLRWAIALLLAAAGVAAEDSCGKNEFQCRDGKCIVSKWVCDGSRECPDGSDESPETCMSVTCRSGEFSCGGRVSRCIPDSWRCDGRTDCENGSDELDCSPKTCSLDEFRCQDGKCISRQFVCDQDWDCLDGSDEAHCAATTCGPAHFRCNSSSCIPSLWACDGDRDCDDGSDEWPQNCGAEDTAAEVVSSPCSSLEFHCGSSECIHRSWVCDGAADCKDKSDEENCAVTTCRPDEFQCADGSCIHGSRQCDREHDCKDMSDELGCINVTQCDGPNKFKCHSGECISLDKVCNSARDCRDWSDEPIKECKTNECLDNNGGCSHICKDLKIGYECLCPSGFRLVDGHQCEDIDECQEPDTCSQLCVNLEGSFKCECRAGFHMDPHTRVCKAVGSIGFLLFTNRHEVRKMTLDRSEYTSLIPNLKNVVALDTEVANNRIYWSDLSQRKIYSAVMDQGTSLSYDAIISGDLHAPDGLAVDWIHGNIYWTDSVPGTVSVADTKGVRRRTLFREKGSRPRAIVVDPVHGFMYWTDWGTPAKIKKGGLNGVDIYSLVTEDIQWPNGITLDLPSGRLYWVDSKLHSISSIDVNGGGRKTILEDEKQLAHPFSLAIYEDKVYWTDVLNEAIFSANRLTGSDVNLVAKNLMSPEDIVLFHNVTQPRGVNWCEATVLPNGGCQYMCLPAPQISAHSPKFTCACPDGMLLAKDMRSCLPEVDTVPTTQGTSTIGPVVTTSAAVSLKRKEDPSATRHKEDPSATRHNEDPSATSTSRQPGDTPELSTVESVTVSSQVQGDMAGRGDEVQRHGVGFLSIFLPIALVALLVFGAILLWRNWRLRNINSINFDNPVYQKTTEDEIHICRSQDGYTYPSRQMVSLEDDVA

SEQ ID NO: 13 - DNA, 14069 bp, Homo sapiens
cgttaaatgcaaacgctgctctggctcatgtgtttgctccgaggtataggttttgttcgactgacgtatcagatagtcagagtggttaccacaccgacgttgtagcagctgcataataaatgactgaaagaatcatgttaggcatgcccacctaacctaacttgaatcatgcgaaaggggagctgttggaattcaaatagactttctggttcccagcagtcggcagtaatagaatgctttcaggaagatgacagaatcaggagaaagatgctgttttgcactatcttgatttgttacagcagccaacttattggcatgatggagtgacaggaaaaacagctggcatggaagatgaaagagaagatgttcaaaagaaaacattcacaaaatgggtaaatgcacaattttctaagtttgggaagcagcatattgagaacctcttcagtgacctacaggatgggaggcgcctcctagacctcctcgaaggcctgacagggcaaaaactgccaaaagaaaaaggatccacaagagttcatgccctgaacaatgtcaacaaggcactgcgggttttgcagaacaataatgttgatttagtgaatattggaagtactgacatcgtagatggaaatcataaactgactcttggtttgatttggaatataatcctccactggcaggtcaaaaatgtaatgaaaaatatcatggctggattgcaacaaaccaacagtgaaaagattctcctgagctgggtccgacaatcaactcgtaattatccacaggttaatgtaatcaacttcaccaccagctggtctgatggcctggctttgaatgctctcatccatagtcataggccagacctatttgactggaatagtgtggtttgccagcagtcagccacacaacgactggaacatgcattcaacatcgccagatatcaattaggcatagagaaactactcgatcctgaagatgttgataccacctatccagataagaagtccatcttaatgtacatcacatcactcttccaagttttgcctcaacaagtgagcattgaagccatccaggaagtggaaatgttgccaaggccacctaaagtgactaaagaagaacattttcagttacatcatcaaatgcactattctcaacagatcacggtcagtctagcacagggatatgagagaacttcttcccctaagcctcgattcaagagctatgcctacacacaggctgcttatgtcaccacctctgaccctacacggagcccatttccttcacagcatttggaagctcctgaagacaagtcatttggcagttcattgatggagagtgaagtaaacctggaccgttatcaaacagctttagaagaagtattatcgtggcttctttctgctgaggacacattgcaagcacaaggagagatttctaatgatgtggaagtggtgaaagaccagtttcatactcatgaggggtacatgatggatttgacagcccatcagggccgggttggtaatattctacaattgggaagtaagctgattggaacaggaaaattatcagaagatgaagaaactgaagtacaagagcagatgaatctcctaaattcaagatgggaatgcctcagggtagctagcatggaaaaacaaagcaatttacatagagttttaatggatctccagaatcagaaactgaaagagttgaatgactggctaacaaaaacagaagaaagaacaaggaaaatggaggaagagcctcttggacctgatcttgaagacctaaaacgccaagtacaacaacataaggtgcttcaagaagatctagaacaagaacaagtcagggtcaattctctcactcacatggtggtggtagttgatgaatctagtggagatcacgcaactgctgctttggaagaacaacttaaggtattgggagatcgatgggcaaacatctgtagatggacagaagaccgctgggttcttttacaagacatccttctcaaatggcaacgtcttactgaagaacagtgcctttttagtgcatggctttcagaaaaagaagatgcagtgaacaagattcacacaactggctttaaagatcaaaatgaaatgttatcaagtcttcaaaaactggccgttttaaaagcggatctagaaaagaaaaagcaatccatgggcaaactgtattcactcaaacaagatcttctttcaacactgaagaataagtcagtgacccagaagacggaagcatggctggataactttgcccggtgttgggataatttagtccaaaaacttgaaaagagtacagcacagatttcacaggctgtcaccaccactcagccatcactaacacagacaactgtaatggaaacagtaactacggtgaccacaagggaacagatcctggtaaagcatgctcaagaggaacttccaccaccacctccccaaaagaagaggcagattactgtggattctgaaattaggaaaaggttggatgttgatataactgaacttcacagctggattactcgctcagaagctgtgttgcagagtcctgaatttgcaatctttcggaaggaaggcaacttctcagacttaaaagaaaaagtcaatgccatagagcgagaaaaagctgagaagttcagaaaactgcaagatgccagcagatcagctcaggccctggtggaacagatggtgaatgagggtgttaatgcagatagcatcaaacaagcctcagaacaactgaacagccggtggatcgaattctgccagttgctaagtgagagacttaactggctggagtatcagaacaacatcatcgctttctataatcagctacaacaattggagcagatgacaactactgctgaaaactggttgaaaatccaacccaccaccccatcagagccaacagcaattaaaagtcagttaaaaatttgtaaggatgaagtcaaccggctatcaggtcttcaacctcaaattgaacgattaaaaattcaaagcatagccctgaaagagaaaggacaaggacccatgttcctggatgcagactttgtggcctttacaaatcattttaagcaagtcttttctgatgtgcaggccagagagaaagagctacagacaatttttgacactttgccaccaatgcgctatcaggagaccatgagtgccatcaggacatgggtccagcagtcagaaaccaaactctccatacctcaacttagtgtcaccgactatgaaatcatggagcagagactcggggaattgcaggctttacaaagttctctgcaagagcaacaaagtggcctatactatctcagcaccactgtgaaagagatgtcgaagaaagcgccctctgaaattagccggaaatatcaatcagaatttgaagaaattgagggacgctggaagaagctctcctcccagctggttgagcattgtcaaaagctagaggagcaaatgaataaactccgaaaaattcagaatcacatacaaaccctgaagaaatggatggctgaagttgatgtttttctgaaggaggaatggcctgcccttggggattcagaaattctaaaaaagcagctgaaacagtgcagacttttagtcagtgatattcagacaattcagcccagtctaaacagtgtcaatgaaggtgggcagaagataaagaatgaagcagagccagagtttgcttcgagacttgagacagaactcaaagaacttaacactcagtgggatcacatgtgccaacaggtctatgccagaaaggaggccttgaagggaggtttggagaaaactgtaagcctccagaaagatctatcagagatgcacgaatggatgacacaagctgaagaagagtatcttgagagagattttgaatataaaactccagatgaattacagaaagcagttgaagagatgaagagagctaaagaagaggcccaacaaaaagaagcgaaagtgaaactccttactgagtctgtaaatagtgtcatagctcaagctccacctgtagcacaagaggccttaaaaaaggaacttgaaactctaaccaccaactaccagtggctctgcactaggctgaatgggaaatgcaagactttggaagaagtttgggcatgttggcatgagttattgtcatacttggagaaagcaaacaagtggctaaatgaagtagaatttaaacttaaaaccactgaaaacattcctggcggagctgaggaaatctctgaggtgctagattcacttgaaaatttgatgcgacattcagaggataacccaaatcagattcgcatattggcacagaccctaacagatggcggagtcatggatgagctaatcaatgaggaacttgagacatttaattctcgttggagggaactacatgaagaggctgtaaggaggcaaaagttgcttgaacagagcatccagtctgcccaggagactgaaaaatccttacacttaatccaggagtccctcacattcattgacaagcagttggcagcttatattgcagacaaggtggacgcagctcaaatgcctcaggaagcccagaaaatccaatctgatttgacaagtcatgagatcagtttagaagaaatgaagaaacataatcaggggaaggaggctgcccaaagagtcctgtctcagattgatgttgcacagaaaaaattacaagatgtctccatgaagtttcgattattccagaaaccagccaattttgagcagcgtctacaagaaagtaagatgattttagatgaagtgaagatgcacttgcctgcattggaaacaaagagtgtggaacaggaagtagtacagtcacagctaaatcattgtgtgaacttgtataaaagtctgagtgaagtgaagtctgaagtggaaatggtgataaagactggacgtcagattgtacagaaaaagcagacggaaaatcccaaagaacttgatgaaagagtaacagctttgaaattgcattataatgagctgggagcaaaggtaacagaaagaaagcaacagttggagaaatgcttgaaattgtcccgtaagatgcgaaaggaaatgaatgtcttgacagaatggctggcagctacagatatggaattgacaaagagatcagcagttgaaggaatgcctagtaatttggattctgaagttgcctggggaaaggctactcaaaaagagattgagaaacagaaggtgcacctgaagagtatcacagaggtaggagaggccttgaaaacagttttgggcaagaaggagacgttggtggaagataaactcagtcttctgaatagtaactggatagctgtcacctcccgagcagaagagtggttaaatcttttgttggaataccagaaacacatggaaacttttgaccagaatgtggaccacatcacaaagtggatcattcaggctgacacacttttggatgaatcagagaaaaagaaaccccagcaaaaagaagacgtgcttaagcgtttaaaggcagaactgaatgacatacgcccaaaggtggactctacacgtgaccaagcagcaaacttgatggcaaaccgcggtgaccactgcaggaaattagtagagccccaaatctcagagctcaaccatcgatttgcagccatttcacacagaattaagactggaaaggcctccattcctttgaaggaattggagcagtttaactcagatatacaaaaattgcttgaaccactggaggctgaaattcagcagggggtgaatctgaaagaggaagacttcaataaagatatgaatgaagacaatgagggtactgtaaaagaattgttgcaaagaggagacaacttacaacaaagaatcacagatgagagaaagcgagaggaaataaagataaaacagcagctgttacagacaaaacataatgctctcaaggatttgaggtctcaaagaagaaaaaaggctctagaaatttctcatcagtggtatcagtacaagaggcaggctgatgatctcctgaaatgcttggatgacattgaaaaaaaattagccagcctacctgagcccagagatgaaaggaaaataaaggaaattgatcgggaattgcagaagaagaaagaggagctgaatgcagtgcgtaggcaagctgagggcttgtctgaggatggggccgcaatggcagtggagccaactcagatccagctcagcaagcgctggcgggaaattgagagcaaatttgctcagtttcgaagactcaactttgcacaaattcacactgtccgtgaagaaacgatgatggtgatgactgaagacatgcctttggaaatttcttatgtgccttctacttatttgactgaaatcactcatgtctcacaagccctattagaagtggaacaacttctcaatgctcctgacctctgtgctaaggactttgaagatctctttaagcaagaggagtctctgaagaatataaaagatagtctacaacaaagctcaggtcggattgacattattcatagcaagaagacagcagcattgcaaagtgcaacgcctgtggaaagggtgaagctacaggaagctctctcccagcttgatttccaatgggaaaaagttaacaaaatgtacaaggaccgacaagggcgatttgacagatctgttgagaaatggcggcgttttcattatgatataaagatatttaatcagtggctaacagaagctgaacagtttctcagaaagacacaaattcctgagaattgggaacatgctaaatacaaatggtatcttaaggaactccaggatggcattgggcagcggcaaactgttgtcagaacattgaatgcaactggggaagaaataattcagcaatcctcaaaaacagatgccagtattctacaggaaaaattgggaagcctgaatctgcggtggcaggaggtctgcaaacagctgtcagacagaaaaaagaggctagaagaacaaaagaatatcttgtcagaatttcaaagagatttaaatgaatttgttttatggttggaggaagcagataacattgctagtatcccacttgaacctggaaaagagcagcaactaaaagaaaagcttgagcaagtcaagttactggtggaagagttgcccctgcgccagggaattctcaaacaattaaatgaaactggaggacccgtgcttgtaagtgctcccataagcccagaagagcaagataaacttgaaaataagctcaagcagacaaatctccagtggataaaggtttccagagctttacctgagaaacaaggagaaattgaagctcaaataaaagaccttgggcagcttgaaaaaaagcttgaagaccttgaagagcagttaaatcatctgctgctgtggttatctcctattaggaatcagttggaaatttataaccaaccaaaccaagaaggaccatttgacgttcaggaaactgaaatagcagttcaagctaaacaaccggatgtggaagagattttgtctaaagggcagcatttgtacaaggaaaaaccagccactcagccagtgaagaggaagttagaagatctgagctctgagtggaaggcggtaaaccgtttacttcaagagctgagggcaaagcagcctgacctagctcctggactgaccactattggagcctctcctactcagactgttactctggtgacacaacctgtggttactaaggaaactgccatctccaaactagaaatgccatcttccttgatgttggaggtacctgctctggcagatttcaaccgggcttggacagaacttaccgactggctttctctgcttgatcaagttataaaatcacagagggtgatggtgggtgaccttgaggatatcaacgagatgatcatcaagcagaaggcaacaatgcaggatttggaacagaggcgtccccagttggaagaactcattaccgctgcccaaaatttgaaaaacaagaccagcaatcaagaggctagaacaatcattacggatcgaattgaaagaattcagaatcagtgggatgaagtacaagaacaccttcagaaccggaggcaacagttgaatgaaatgttaaaggattcaacacaatggctggaagctaaggaagaagctgagcaggtcttaggacaggccagagccaagcttgagtcatggaaggagggtccctatacagtagatgcaatccaaaagaaaatcacagaaaccaagcagttggccaaagacctccgccagtggcagacaaatgtagatgtggcaaatgacttggccctgaaacttctccgggattattctgcagatgataccagaaaagtccacatgataacagagaatatcaatgcctcttggagaagcattcataaaagggtgagtgagcgagaggctgctttggaagaaactcatagattactgcaacagttccccctggacctggaaaagtttcttgcctggcttacagaagctgaaacaactgccaatgtcctacaggatgctacccgtaaggaaaggctcctagaagactccaagggagtaaaagagctgatgaaacaatggcaagacctccaaggtgaaattgaagctcacacagatgtttatcacaacctggatgaaaacagccaaaaaatcctgagatccctggaaggttccgatgatgcagtcctgttacaaagacgtttggataacatgaacttcaagtggagtgaacttcggaaaaagtctctcaacattaggtcccatttggaagccagttctgaccagtggaagcgtctgcacctttctctgcaggaacttctggtgtggctacagctgaaagatgatgaattaagccggcaggcacctattggaggcgactttccagcagttcagaagcagaacgatgtacatagggccttcaagagggaattgaaaactaaagaacctgtaatcatgagtactcttgagactgtacgaatatttctgacagagcagcctttggaaggactagagaaactctaccaggagcccagagagctgcctcctgaggagagagcccagaatgtcactcggcttctacgaaagcaggctgaggaggtcaatactgagtgggaaaaattgaacctgcactccgctgactggcagagaaaaatagatgagacccttgaaagactccaggaacttcaagaggccacggatgagctggacctcaagctgcgccaagctgaggtgatcaagggatcctggcagcccgtgggcgatctcctcattgactctctccaagatcacctcgagaaagtcaaggcacttcgaggagaaattgcgcctctgaaagagaacgtgagccacgtcaatgaccttgctcgccagcttaccactttgggcattcagctctcaccgtataacctcagcactctggaagacctgaacaccagatggaagcttctgcaggtggccgtcgaggaccgagtcaggcagctgcatgaagcccacagggactttggtccagcatctcagcactttctttccacgtctgtccagggtccctgggagagagccatctcgccaaacaaagtgccctactatatcaaccacgagactcaaacaacttgctgggaccatcccaaaatgacagagctctaccagtctttagctgacctgaataatgtcagattctcagcttataggactgccatgaaactccgaagactgcagaaggccctttgcttggatctcttgagcctgtcagctgcatgtgatgccttggaccagcacaacctcaagcaaaatgaccagcccatggatatcctgcagattattaattgtttgaccactatttatgaccgcctggagcaagagcacaacaatttggtcaacgtccctctctgcgtggatatgtgtctgaactggctgctgaatgtttatgatacgggacgaacagggaggatccgtgtcctgtcttttaaaactggcatcatttccctgtgtaaagcacatttggaagacaagtacagataccttttcaagcaagtggcaagttcaacaggattttgtgaccagcgcaggctgggcctccttctgcatgattctatccaaattccaagacagttgggtgaagttgcatcctttgggggcagtaacattgagccaagtgtccggagctgcttccaatttgctaataataagccagagatcgaagcggccctcttcctagactggatgagactggaaccccagtccatggtgtggctgcccgtcctgcacagagtggctgctgcagaaactgccaagcatcaggccaaatgtaacatctgcaaagagtgtccaatcattggattcaggtacaggagtctaaagcactttaattatgacatctgccaaagctgctttttttctggtcgagttgcaaaaggccataaaatgcactatcccatggtggaatattgcactccgactacatcaggagaagatgttcgagactttgccaaggtactaaaaaacaaatttcgaaccaaaaggtattttgcgaagcatccccgaatgggctacctgccagtgcagactgtcttagagggggacaacatggaaactcccgttactctgatcaacttctggccagtagattctgcgcctgcctcgtcccctcagctttcacacgatgatactcattcacgcattgaacattatgctagcaggctagcagaaatggaaaacagcaatggatcttatctaaatgatagcatctctcctaatgagagcatagatgatgaacatttgttaatccagcattactgccaaagtttgaaccaggactcccccctgagccagcctcgtagtcctgcccagatcttgatttccttagagagtgaggaaagaggggagctagagagaatcctagcagatcttgaggaagaaaacaggaatctgcaagcagaatatgaccgtctaaagcagcagcacgaacataaaggcctgtccccactgccgtcccctcctgaaatgatgcccacctctccccagagtccccgggatgctgagctcattgctgaggccaagctactgcgtcaacacaaaggccgcctggaagccaggatgcaaatcctggaagaccacaataaacagctggagtcacagttacacaggctaaggcagctgctggagcaaccccaggcagaggccaaagtgaatggcacaacggtgtcctctccttctacctctctacagaggtccgacagcagtcagcctatgctgctccgagtggttggcagtcaaacttcggactccatgggtgaggaagatcttctcagtcctccccaggacacaagcacagggttagaggaggtgatggagcaactcaacaactccttccctagttcaagaggaagaaatacccctggaaagccaatgagagaggacacaatgtaggaagtcttttccacatggcagatgatttgggcagagcgatggagtccttagtatcagtcatgacagatgaagaaggagcagaataaatgttttacaactcctgattcccgcatggtttttataatattcatacaacaaagaggattagacagtaagagtttacaagaaataaatctatatttttgtgaagggtagtggtattatactgtagatttcagtagtttctaagtctgttattgttttgttaacaatggcaggttttacacgtctatgcaattgtacaaaaaagttataagaaaactacatgtaaaatcttgatagctaaataacttgccatttctttatatggaacgcattttgggttgtttaaaaatttataacagttataaagaaagattgtaaactaaagtgtgctttataaaaaaaagttgtttataaaaacccctaaaaacaaaacaaacacacacacacacacatacacacacacacacaaaactttgaggcagcgcattgttttgcatccttttggcgtgatatccatatgaaattcatggctttttctttttttgcatattaaagataagacttcctctaccaccacaccaaatgactactacacactgctcatttgagaactgtcagctgagtggggcaggcttgagttttcatttcatatatctatatgtctataagtatataaatactatagttatatagataaagagatacgaatttctatagactgactttttccattttttaaatgttcatgtcacatcctaatagaaagaaattacttctagtcagtcatccaggcttacctgcttggtctagaatggatttttcccggagccggaagccaggaggaaactacaccacactaaaacattgtctacagctccagatgtttctcattttaaacaactttccactgacaacgaaagtaaagtaaagtattggatttttttaaagggaacatgtgaatgaatacacaggacttattatatcagagtgagtaatcggttggttggttgattgattgattgattgatacattcagcttcctgctgctagcaatgccacgatttagatttaatgatgcttcagtggaaatcaatcagaaggtattctgaccttgtgaacatcagaaggtattttttaactcccaagcagtagcaggacgatgatagggctggagggctatggattcccagcccatccctgtgaaggagtaggccactctttaagtgaaggattggatgattgttcataatacataaagttctctgtaattacaactaaattattatgccctcttctcacagtcaaaaggaactgggtggtttggtttttgttgcttttttagatttattgtcccatgtgggatgagtttttaaatgccacaagacataatttaaaataaataaactttgggaaaaggtgtaaaacagtagccccatcacatttgtgatactgacaggtatcaacccagaagcccatgaactgtgtttccatcctttgcatttctctgcgagtagttccacacaggtttgtaagtaagtaagaaagaaggcaaattgattcaaatgttacaaaaaaacccttcttggtggattagacaggttaaatatataaacaaacaaacaaaaattgctcaaaaaagaggagaaaagctcaagaggaaaagctaaggactggtaggaaaaagctttactctttcatgccattttatttctttttgatttttaaatcattcattcaatagataccaccgtgtgacctataattttgcaaatctgttacctctgacatcaagtgtaattagcttttggagagtgggctgacatcaagtgtaattagcttttggagagtgggttttgtccattattaataattaattaattaacatcaaacacggcttctcatgctatttctacctcactttggttttggggtgttcctgataattgtgcacacctgagttcacagcttcaccacttgtccattgcgttattttctttttcctttataattctttctttttccttcataattttcaaaagaaaacccaaagctctaaggtaacaaattaccaaattacatgaagatttggtttttgtcttgcatttttttcctttatgtgacgctggaccttttctttacccaaggatttttaaaactcagatttaaaacaaggggttactttacatcctactaagaagtttaagtaagtaagtttcattctaaaatcagaggtaaatagagtgcataaataattttgttttaatctttttgtttttcttttagacacattagctctggagtgagtctgtcataatatttgaacaaaaattgagagctttattgctgcattttaagcataattaatttggacattatttcgtgttgtgttctttataaccaccaagtattaaactgtaaatcataatgtaactgaagcataaacatcacatggcatgttttgtcattgttttcaggtactgagttcttacttgagtatcataatatattgtgttttaacaccaacactgtaacatttacgaattatttttttaaacttcagttttactgcattttcacaacatatcagacttcaccaaatatatgccttactattgtattatagtactgctttactgtgtatctcaataaagcacgcagttatgttac

SEQ ID NO: 14 - DNA, 13993 bp, Homo sapiens
tcctggcatcagttactgtgttgactcactcagtgttgggatcactcactttccccctacaggactcagatctgggaggcaattaccttcggagaaaaacgaataggaaaaactgaagtgttactttttttaaagctgctgaagtttgttggtttctcattgtttttaagcctactggagcaataaagtttgaagaacttttaccaggttttttttatcgctgccttgatatacacttttcaaaatgctttggtgggaagaagtagaggactgttatgaaagagaagatgttcaaaagaaaacattcacaaaatgggtaaatgcacaattttctaagtttgggaagcagcatattgagaacctcttcagtgacctacaggatgggaggcgcctcctagacctcctcgaaggcctgacagggcaaaaactgccaaaagaaaaaggatccacaagagttcatgccctgaacaatgtcaacaaggcactgcgggttttgcagaacaataatgttgatttagtgaatattggaagtactgacatcgtagatggaaatcataaactgactcttggtttgatttggaatataatcctccactggcaggtcaaaaatgtaatgaaaaatatcatggctggattgcaacaaaccaacagtgaaaagattctcctgagctgggtccgacaatcaactcgtaattatccacaggttaatgtaatcaacttcaccaccagctggtctgatggcctggctttgaatgctctcatccatagtcataggccagacctatttgactggaatagtgtggtttgccagcagtcagccacacaacgactggaacatgcattcaacatcgccagatatcaattaggcatagagaaactactcgatcctgaagatgttgataccacctatccagataagaagtccatcttaatgtacatcacatcactcttccaagttttgcctcaacaagtgagcattgaagccatccaggaagtggaaatgttgccaaggccacctaaagtgactaaagaagaacattttcagttacatcatcaaatgcactattctcaacagatcacggtcagtctagcacagggatatgagagaacttcttcccctaagcctcgattcaagagctatgcctacacacaggctgcttatgtcaccacctctgaccctacacggagcccatttccttcacagcatttggaagctcctgaagacaagtcatttggcagttcattgatggagagtgaagtaaacctggaccgttatcaaacagctttagaagaagtattatcgtggcttctttctgctgaggacacattgcaagcacaaggagagatttctaatgatgtggaagtggtgaaagaccagtttcatactcatgaggggtacatgatggatttgacagcccatcagggccgggttggtaatattctacaattgggaagtaagctgattggaacaggaaaattatcagaagatgaagaaactgaagtacaagagcagatgaatctcctaaattcaagatgggaatgcctcagggtagctagcatggaaaaacaaagcaatttacatagagttttaatggatctccagaatcagaaactgaaagagttgaatgactggctaacaaaaacagaagaaagaacaaggaaaatggaggaagagcctcttggacctgatcttgaagacctaaaacgccaagtacaacaacataaggtgcttcaagaagatctagaacaagaacaagtcagggtcaattctctcactcacatggtggtggtagttgatgaatctagtggagatcacgcaactgctgctttggaagaacaacttaaggtattgggagatcgatgggcaaacatctgtagatggacagaagaccgctgggttcttttacaagacatccttctcaaatggcaacgtcttactgaagaacagtgcctttttagtgcatggctttcagaaaaagaagatgcagtgaacaagattcacacaactggctttaaagatcaaaatgaaatgttatcaagtcttcaaaaactggccgttttaaaagcggatctagaaaagaaaaagcaatccatgggcaaactgtattcactcaaacaagatcttctttcaacactgaagaataagtcagtgacccagaagacggaagcatggctggataactttgcccggtgttgggataatttagtccaaaaacttgaaaagagtacagcacagatttcacaggctgtcaccaccactcagccatcactaacacagacaactgtaatggaaacagtaactacggtgaccacaagggaacagatcctggtaaagcatgctcaagaggaacttccaccaccacctccccaaaagaagaggcagattactgtggattctgaaattaggaaaaggttggatgttgatataactgaacttcacagctggattactcgctcagaagctgtgttgcagagtcctgaatttgcaatctttcggaaggaaggcaacttctcagacttaaaagaaaaagtcaatgccatagagcgagaaaaagctgagaagttcagaaaactgcaagatgccagcagatcagctcaggccctggtggaacagatggtgaatgagggtgttaatgcagatagcatcaaacaagcctcagaacaactgaacagccggtggatcgaattctgccagttgctaagtgagagacttaactggctggagtatcagaacaacatcatcgctttctataatcagctacaacaattggagcagatgacaactactgctgaaaactggttgaaaatccaacccaccaccccatcagagccaacagcaattaaaagtcagttaaaaatttgtaaggatgaagtcaaccggctatcaggtcttcaacctcaaattgaacgattaaaaattcaaagcatagccctgaaagagaaaggacaaggacccatgttcctggatgcagactttgtggcctttacaaatcattttaagcaagtcttttctgatgtgcaggccagagagaaagagctacagacaatttttgacactttgccaccaatgcgctatcaggagaccatgagtgccatcaggacatgggtccagcagtcagaaaccaaactctccatacctcaacttagtgtcaccgactatgaaatcatggagcagagactcggggaattgcaggctttacaaagttctctgcaagagcaacaaagtggcctatactatctcagcaccactgtgaaagagatgtcgaagaaagcgccctctgaaattagccggaaatatcaatcagaatttgaagaaattgagggacgctggaagaagctctcctcccagctggttgagcattgtcaaaagctagaggagcaaatgaataaactccgaaaaattcagaatcacatacaaaccctgaagaaatggatggctgaagttgatgtttttctgaaggaggaatggcctgcccttggggattcagaaattctaaaaaagcagctgaaacagtgcagacttttagtcagtgatattcagacaattcagcccagtctaaacagtgtcaatgaaggtgggcagaagataaagaatgaagcagagccagagtttgcttcgagacttgagacagaactcaaagaacttaacactcagtgggatcacatgtgccaacaggtctatgccagaaaggaggccttgaagggaggtttggagaaaactgtaagcctccagaaagatctatcagagatgcacgaatggatgacacaagctgaagaagagtatcttgagagagattttgaatataaaactccagatgaattacagaaagcagttgaagagatgaagagagctaaagaagaggcccaacaaaaagaagcgaaagtgaaactccttactgagtctgtaaatagtgtcatagctcaagctccacctgtagcacaagaggccttaaaaaaggaacttgaaactctaaccaccaactaccagtggctctgcactaggctgaatgggaaatgcaagactttggaagaagtttgggcatgttggcatgagttattgtcatacttggagaaagcaaacaagtggctaaatgaagtagaatttaaacttaaaaccactgaaaacattcctggcggagctgaggaaatctctgaggtgctagattcacttgaaaatttgatgcgacattcagaggataacccaaatcagattcgcatattggcacagaccctaacagatggcggagtcatggatgagctaatcaatgaggaacttgagacatttaattctcgttggagggaactacatgaagaggctgtaaggaggcaaaagttgcttgaacagagcatccagtctgcccaggagactgaaaaatccttacacttaatccaggagtccctcacattcattgacaagcagttggcagcttatattgcagacaaggtggacgcagctcaaatgcctcaggaagcccagaaaatccaatctgatttgacaagtcatgagatcagtttagaagaaatgaagaaacataatcaggggaaggaggctgcccaaagagtcctgtctcagattgatgttgcacagaaaaaattacaagatgtctccatgaagtttcgattattccagaaaccagccaattttgagcagcgtctacaagaaagtaagatgattttagatgaagtgaagatgcacttgcctgcattggaaacaaagagtgtggaacaggaagtagtacagtcacagctaaatcattgtgtgaacttgtataaaagtctgagtgaagtgaagtctgaagtggaaatggtgataaagactggacgtcagattgtacagaaaaagcagacggaaaatcccaaagaacttgatgaaagagtaacagctttgaaattgcattataatgagctgggagcaaaggtaacagaaagaaagcaacagttggagaaatgcttgaaattgtcccgtaagatgcgaaaggaaatgaatgtcttgacagaatggctggcagctacagatatggaattgacaaagagatcagcagttgaaggaatgcctagtaatttggattctgaagttgcctggggaaaggctactcaaaaagagattgagaaacagaaggtgcacctgaagagtatcacagaggtaggagaggccttgaaaacagttttgggcaagaaggagacgttggtggaagataaactcagtcttctgaatagtaactggatagctgtcacctcccgagcagaagagtggttaaatcttttgttggaataccagaaacacatggaaacttttgaccagaatgtggaccacatcacaaagtggatcattcaggctgacacacttttggatgaatcagagaaaaagaaaccccagcaaaaagaagacgtgcttaagcgtttaaaggcagaactgaatgacatacgcccaaaggtggactctacacgtgaccaagcagcaaacttgatggcaaaccgcggtgaccactgcaggaaattagtagagccccaaatctcagagctcaaccatcgatttgcagccatttcacacagaattaagactggaaaggcctccattcctttgaaggaattggagcagtttaactcagatatacaaaaattgcttgaaccactggaggctgaaattcagcagggggtgaatctgaaagaggaagacttcaataaagatatgaatgaagacaatgagggtactgtaaaagaattgttgcaaagaggagacaacttacaacaaagaatcacagatgagagaaagcgagaggaaataaagataaaacagcagctgttacagacaaaacataatgctctcaaggatttgaggtctcaaagaagaaaaaaggctctagaaatttctcatcagtggtatcagtacaagaggcaggctgatgatctcctgaaatgcttggatgacattgaaaaaaaattagccagcctacctgagcccagagatgaaaggaaaataaaggaaattgatcgggaattgcagaagaagaaagaggagctgaatgcagtgcgtaggcaagctgagggcttgtctgaggatggggccgcaatggcagtggagccaactcagatccagctcagcaagcgctggcgggaaattgagagcaaatttgctcagtttcgaagactcaactttgcacaaattcacactgtccgtgaagaaacgatgatggtgatgactgaagacatgcctttggaaatttcttatgtgccttctacttatttgactgaaatcactcatgtctcacaagccctattagaagtggaacaacttctcaatgctcctgacctctgtgctaaggactttgaagatctctttaagcaagaggagtctctgaagaatataaaagatagtctacaacaaagctcaggtcggattgacattattcatagcaagaagacagcagcattgcaaagtgcaacgcctgtggaaagggtgaagctacaggaagctctctcccagcttgatttccaatgggaaaaagttaacaaaatgtacaaggaccgacaagggcgatttgacagatctgttgagaaatggcggcgttttcattatgatataaagatatttaatcagtggctaacagaagctgaacagtttctcagaaagacacaaattcctgagaattgggaacatgctaaatacaaatggtatcttaaggaactccaggatggcattgggcagcggcaaactgttgtcagaacattgaatgcaactggggaagaaataattcagcaatcctcaaaaacagatgccagtattctacaggaaaaattgggaagcctgaatctgcggtggcaggaggtctgcaaacagctgtcagacagaaaaaagaggctagaagaacaaaagaatatcttgtcagaatttcaaagagatttaaatgaatttgttttatggttggaggaagcagataacattgctagtatcccacttgaacctggaaaagagcagcaactaaaagaaaagcttgagcaagtcaagttactggtggaagagttgcccctgcgccagggaattctcaaacaattaaatgaaactggaggacccgtgcttgtaagtgctcccataagcccagaagagcaagataaacttgaaaataagctcaagcagacaaatctccagtggataaaggtttccagagctttacctgagaaacaaggagaaattgaagctcaaataaaagaccttgggcagcttgaaaaaaagcttgaagaccttgaagagcagttaaatcatctgctgctgtggttatctcctattaggaatcagttggaaatttataaccaaccaaaccaagaaggaccatttgacgttcaggaaactgaaatagcagttcaagctaaacaaccggatgtggaagagattttgtctaaagggcagcatttgtacaaggaaaaaccagccactcagccagtgaagaggaagttagaagatctgagctctgagtggaaggcggtaaaccgtttacttcaagagctgagggcaaagcagcctgacctagctcctggactgaccactattggagcctctcctactcagactgttactctggtgacacaacctgtggttactaaggaaactgccatctccaaactagaaatgccatcttccttgatgttggaggtacctgctctggcagatttcaaccgggcttggacagaacttaccgactggctttctctgcttgatcaagttataaaatcacagagggtgatggtgggtgaccttgaggatatcaacgagatgatcatcaagcagaaggcaacaatgcaggatttggaacagaggcgtccccagttggaagaactcattaccgctgcccaaaatttgaaaaacaagaccagcaatcaagaggctagaacaatcattacggatcgaattgaaagaattcagaatcagtgggatgaagtacaagaacaccttcagaaccggaggcaacagttgaatgaaatgttaaaggattcaacacaatggctggaagctaaggaagaagctgagcaggtcttaggacaggccagagccaagcttgagtcatggaaggagggtccctatacagtagatgcaatccaaaagaaaatcacagaaaccaagcagttggccaaagacctccgccagtggcagacaaatgtagatgtggcaaatgacttggccctgaaacttctccgggattattctgcagatgataccagaaaagtccacatgataacagagaatatcaatgcctcttggagaagcattcataaaagggtgagtgagcgagaggctgctttggaagaaactcatagattactgcaacagttccccctggacctggaaaagtttcttgcctggcttacagaagctgaaacaactgccaatgtcctacaggatgctacccgtaaggaaaggctcctagaagactccaagggagtaaaagagctgatgaaacaatggcaagacctccaaggtgaaattgaagctcacacagatgtttatcacaacctggatgaaaacagccaaaaaatcctgagatccctggaaggttccgatgatgcagtcctgttacaaagacgtttggataacatgaacttcaagtggagtgaacttcggaaaaagtctctcaacattaggtcccatttggaagccagttctgaccagtggaagcgtctgcacctttctctgcaggaacttctggtgtggctacagctgaaagatgatgaattaagccggcaggcacctattggaggcgactttccagcagttcagaagcagaacgatgtacatagggccttcaagagggaattgaaaactaaagaacctgtaatcatgagtactcttgagactgtacgaatatttctgacagagcagcctttggaaggactagagaaactctaccaggagcccagagagctgcctcctgaggagagagcccagaatgtcactcggcttctacgaaagcaggctgaggaggtcaatactgagtgggaaaaattgaacctgcactccgctgactggcagagaaaaatagatgagacccttgaaagactccaggaacttcaagaggccacggatgagctggacctcaagctgcgccaagctgaggtgatcaagggatcctggcagcccgtgggcgatctcctcattgactctctccaagatcacctcgagaaagtcaaggcacttcgaggagaaattgcgcctctgaaagagaacgtgagccacgtcaatgaccttgctcgccagcttaccactttgggcattcagctctcaccgtataacctcagcactctggaagacctgaacaccagatggaagcttctgcaggtggccgtcgaggaccgagtcaggcagctgcatgaagcccacagggactttggtccagcatctcagcactttctttccacgtctgtccagggtccctgggagagagccatctcgccaaacaaagtgccctactatatcaaccacgagactcaaacaacttgctgggaccatcccaaaatgacagagctctaccagtctttagctgacctgaataatgtcagattctcagcttataggactgccatgaaactccgaagactgcagaaggccctttgcttggatctcttgagcctgtcagctgcatgtgatgccttggaccagcacaacctcaagcaaaatgaccagcccatggatatcctgcagattattaattgtttgaccactatttatgaccgcctggagcaagagcacaacaatttggtcaacgtccctctctgcgtggatatgtgtctgaactggctgctgaatgtttatgatacgggacgaacagggaggatccgtgtcctgtcttttaaaactggcatcatttccctgtgtaaagcacatttggaagacaagtacagataccttttcaagcaagtggcaagttcaacaggattttgtgaccagcgcaggctgggcctccttctgcatgattctatccaaattccaagacagttgggtgaagttgcatcctttgggggcagtaacattgagccaagtgtccggagctgcttccaatttgctaataataagccagagatcgaagcggccctcttcctagactggatgagactggaaccccagtccatggtgtggctgcccgtcctgcacagagtggctgctgcagaaactgccaagcatcaggccaaatgtaacatctgcaaagagtgtccaatcattggattcaggtacaggagtctaaagcactttaattatgacatctgccaaagctgctttttttctggtcgagttgcaaaaggccataaaatgcactatcccatggtggaatattgcactccgactacatcaggagaagatgttcgagactttgccaaggtactaaaaaacaaatttcgaaccaaaaggtattttgcgaagcatccccgaatgggctacctgccagtgcagactgtcttagagggggacaacatggaaactcccgttactctgatcaacttctggccagtagattctgcgcctgcctcgtcccctcagctttcacacgatgatactcattcacgcattgaacattatgctagcaggctagcagaaatggaaaacagcaatggatcttatctaaatgatagcatctctcctaatgagagcatagatgatgaacatttgttaatccagcattactgccaaagtttgaaccaggactcccccctgagccagcctcgtagtcctgcccagatcttgatttccttagagagtgaggaaagaggggagctagagagaatcctagcagatcttgaggaagaaaacaggaatctgcaagcagaatatgaccgtctaaagcagcagcacgaacataaaggcctgtccccactgccgtcccctcctgaaatgatgcccacctctccccagagtccccgggatgctgagctcattgctgaggccaagctactgcgtcaacacaaaggccgcctggaagccaggatgcaaatcctggaagaccacaataaacagctggagtcacagttacacaggctaaggcagctgctggagcaaccccaggcagaggccaaagtgaatggcacaacggtgtcctctccttctacctctctacagaggtccgacagcagtcagcctatgctgctccgagtggttggcagtcaaacttcggactccatgggtgaggaagatcttctcagtcctccccaggacacaagcacagggttagaggaggtgatggagcaactcaacaactccttccctagttcaagaggaagaaatacccctggaaagccaatgagagaggacacaatgtaggaagtcttttccacatggcagatgatttgggcagagcgatggagtccttagtatcagtcatgacagatgaagaaggagcagaataaatgttttacaactcctgattcccgcatggtttttataatattcatacaacaaagaggattagacagtaagagtttacaagaaataaatctatatttttgtgaagggtagtggtattatactgtagatttcagtagtttctaagtctgttattgttttgttaacaatggcaggttttacacgtctatgcaattgtacaaaaaagttataagaaaactacatgtaaaatcttgatagctaaataacttgccatttctttatatggaacgcattttgggttgtttaaaaatttataacagttataaagaaagattgtaaactaaagtgtgctttataaaaaaaagttgtttataaaaacccctaaaaacaaaacaaacacacacacacacacatacacacacacacacaaaactttgaggcagcgcattgttttgcatccttttggcgtgatatccatatgaaattcatggctttttctttttttgcatattaaagataagacttcctctaccaccacaccaaatgactactacacactgctcatttgagaactgtcagctgagtggggcaggcttgagttttcatttcatatatctatatgtctataagtatataaatactatagttatatagataaagagatacgaatttctatagactgactttttccattttttaaatgttcatgtcacatcctaatagaaagaaattacttctagtcagtcatccaggcttacctgcttggtctagaatggatttttcccggagccggaagccaggaggaaactacaccacactaaaacattgtctacagctccagatgtttctcattttaaacaactttccactgacaacgaaagtaaagtaaagtattggatttttttaaagggaacatgtgaatgaatacacaggacttattatatcagagtgagtaatcggttggttggttgattgattgattgattgatacattcagcttcctgctgctagcaatgccacgatttagatttaatgatgcttcagtggaaatcaatcagaaggtattctgaccttgtgaacatcagaaggtattttttaactcccaagcagtagcaggacgatgatagggctggagggctatggattcccagcccatccctgtgaaggagtaggccactctttaagtgaaggattggatgattgttcataatacataaagttctctgtaattacaactaaattattatgccctcttctcacagtcaaaaggaactgggtggtttggtttttgttgcttttttagatttattgtcccatgtgggatgagtttttaaatgccacaagacataatttaaaataaataaactttgggaaaaggtgtaaaacagtagccccatcacatttgtgatactgacaggtatcaacccagaagcccatgaactgtgtttccatcctttgcatttctctgcgagtagttccacacaggtttgtaagtaagtaagaaagaaggcaaattgattcaaatgttacaaaaaaacccttcttggtggattagacaggttaaatatataaacaaacaaacaaaaattgctcaaaaaagaggagaaaagctcaagaggaaaagctaaggactggtaggaaaaagctttactctttcatgccattttatttctttttgatttttaaatcattcattcaatagataccaccgtgtgacctataattttgcaaatctgttacctctgacatcaagtgtaattagcttttggagagtgggctgacatcaagtgtaattagcttttggagagtgggttttgtccattattaataattaattaattaacatcaaacacggcttctcatgctatttctacctcactttggttttggggtgttcctgataattgtgcacacctgagttcacagcttcaccacttgtccattgcgttattttctttttcctttataattctttctttttccttcataattttcaaaagaaaacccaaagctctaaggtaacaaattaccaaattacatgaagatttggtttttgtcttgcatttttttcctttatgtgacgctggaccttttctttacccaaggatttttaaaactcagatttaaaacaaggggttactttacatcctactaagaagtttaagtaagtaagtttcattctaaaatcagaggtaaatagagtgcataaataattttgttttaatctttttgtttttcttttagacacattagctctggagtgagtctgtcataatatttgaacaaaaattgagagctttattgctgcattttaagcataattaatttggacattatttcgtgttgtgttctttataaccaccaagtattaaactgtaaatcataatgtaactgaagcataaacatcacatggcatgttttgtcattgttttcaggtactgagttcttacttgagtatcataatatattgtgttttaacaccaacactgtaacatttacgaattatttttttaaacttcagttttactgcattttcacaacatatcagacttcaccaaatatatgccttactattgtattatagtactgctttactgtgtatctcaataaagcacgcagttatgttac

SEQ ID NO: 15 - DNA, 14000 bp, Homo sapiens
atgctgtctgtgaagctgaatctgtgagaacacctcactattcacggcaaccggagtggaagaaacaggtgcaaaaagattgtgtgtttgtctgcttttgtgaggctggtcagagattctgtgcctgctttatctgtgcttggctatgactctacctccaggtttaccataccccatagaatgtgtaagagaaaagtaccaacagggaaatcagcaaaaagctttcctatgaaggtgtgtagccagcctccgcagaatttgaaatgtctgaggtctcatctgatgaaagagaagatgttcaaaagaaaacattcacaaaatgggtaaatgcacaattttctaagtttgggaagcagcatattgagaacctcttcagtgacctacaggatgggaggcgcctcctagacctcctcgaaggcctgacagggcaaaaactgccaaaagaaaaaggatccacaagagttcatgccctgaacaatgtcaacaaggcactgcgggttttgcagaacaataatgttgatttagtgaatattggaagtactgacatcgtagatggaaatcataaactgactcttggtttgatttggaatataatcctccactggcaggtcaaaaatgtaatgaaaaatatcatggctggattgcaacaaaccaacagtgaaaagattctcctgagctgggtccgacaatcaactcgtaattatccacaggttaatgtaatcaacttcaccaccagctggtctgatggcctggctttgaatgctctcatccatagtcataggccagacctatttgactggaatagtgtggtttgccagcagtcagccacacaacgactggaacatgcattcaacatcgccagatatcaattaggcatagagaaactactcgatcctgaagatgttgataccacctatccagataagaagtccatcttaatgtacatcacatcactcttccaagttttgcctcaacaagtgagcattgaagccatccaggaagtggaaatgttgccaaggccacctaaagtgactaaagaagaacattttcagttacatcatcaaatgcactattctcaacagatcacggtcagtctagcacagggatatgagagaacttcttcccctaagcctcgattcaagagctatgcctacacacaggctgcttatgtcaccacctctgaccctacacggagcccatttccttcacagcatttggaagctcctgaagacaagtcatttggcagttcattgatggagagtgaagtaaacctggaccgttatcaaacagctttagaagaagtattatcgtggcttctttctgctgaggacacattgcaagcacaaggagagatttctaatgatgtggaagtggtgaaagaccagtttcatactcatgaggggtacatgatggatttgacagcccatcagggccgggttggtaatattctacaattgggaagtaagctgattggaacaggaaaattatcagaagatgaagaaactgaagtacaagagcagatgaatctcctaaattcaagatgggaatgcctcagggtagctagcatggaaaaacaaagcaatttacatagagttttaatggatctccagaatcagaaactgaaagagttgaatgactggctaacaaaaacagaagaaagaacaaggaaaatggaggaagagcctcttggacctgatcttgaagacctaaaacgccaagtacaacaacataaggtgcttcaagaagatctagaacaagaacaagtcagggtcaattctctcactcacatggtggtggtagttgatgaatctagtggagatcacgcaactgctgctttggaagaacaacttaaggtattgggagatcgatgggcaaacatctgtagatggacagaagaccgctgggttcttttacaagacatccttctcaaatggcaacgtcttactgaagaacagtgcctttttagtgcatggctttcagaaaaagaagatgcagtgaacaagattcacacaactggctttaaagatcaaaatgaaatgttatcaagtcttcaaaaactggccgttttaaaagcggatctagaaaagaaaaagcaatccatgggcaaactgtattcactcaaacaagatcttctttcaacactgaagaataagtcagtgacccagaagacggaagcatggctggataactttgcccggtgttgggataatttagtccaaaaacttgaaaagagtacagcacagatttcacaggctgtcaccaccactcagccatcactaacacagacaactgtaatggaaacagtaactacggtgaccacaagggaacagatcctggtaaagcatgctcaagaggaacttccaccaccacctccccaaaagaagaggcagattactgtggattctgaaattaggaaaaggttggatgttgatataactgaacttcacagctggattactcgctcagaagctgtgttgcagagtcctgaatttgcaatctttcggaaggaaggcaacttctcagacttaaaagaaaaagtcaatgccatagagcgagaaaaagctgagaagttcagaaaactgcaagatgccagcagatcagctcaggccctggtggaacagatggtgaatgagggtgttaatgcagatagcatcaaacaagcctcagaacaactgaacagccggtggatcgaattctgccagttgctaagtgagagacttaactggctggagtatcagaacaacatcatcgctttctataatcagctacaacaattggagcagatgacaactactgctgaaaactggttgaaaatccaacccaccaccccatcagagccaacagcaattaaaagtcagttaaaaatttgtaaggatgaagtcaaccggctatcaggtcttcaacctcaaattgaacgattaaaaattcaaagcatagccctgaaagagaaaggacaaggacccatgttcctggatgcagactttgtggcctttacaaatcattttaagcaagtcttttctgatgtgcaggccagagagaaagagctacagacaatttttgacactttgccaccaatgcgctatcaggagaccatgagtgccatcaggacatgggtccagcagtcagaaaccaaactctccatacctcaacttagtgtcaccgactatgaaatcatggagcagagactcggggaattgcaggctttacaaagttctctgcaagagcaacaaagtggcctatactatctcagcaccactgtgaaagagatgtcgaagaaagcgccctctgaaattagccggaaatatcaatcagaatttgaagaaattgagggacgctggaagaagctctcctcccagctggttgagcattgtcaaaagctagaggagcaaatgaataaactccgaaaaattcagaatcacatacaaaccctgaagaaatggatggctgaagttgatgtttttctgaaggaggaatggcctgcccttggggattcagaaattctaaaaaagcagctgaaacagtgcagacttttagtcagtgatattcagacaattcagcccagtctaaacagtgtcaatgaaggtgggcagaagataaagaatgaagcagagccagagtttgcttcgagacttgagacagaactcaaagaacttaacactcagtgggatcacatgtgccaacaggtctatgccagaaaggaggccttgaagggaggtttggagaaaactgtaagcctccagaaagatctatcagagatgcacgaatggatgacacaagctgaagaagagtatcttgagagagattttgaatataaaactccagatgaattacagaaagcagttgaagagatgaagagagctaaagaagaggcccaacaaaaagaagcgaaagtgaaactccttactgagtctgtaaatagtgtcatagctcaagctccacctgtagcacaagaggccttaaaaaaggaacttgaaactctaaccaccaactaccagtggctctgcactaggctgaatgggaaatgcaagactttggaagaagtttgggcatgttggcatgagttattgtcatacttggagaaagcaaacaagtggctaaatgaagtagaatttaaacttaaaaccactgaaaacattcctggcggagctgaggaaatctctgaggtgctagattcacttgaaaatttgatgcgacattcagaggataacccaaatcagattcgcatattggcacagaccctaacagatggcggagtcatggatgagctaatcaatgaggaacttgagacatttaattctcgttggagggaactacatgaagaggctgtaaggaggcaaaagttgcttgaacagagcatccagtctgcccaggagactgaaaaatccttacacttaatccaggagtccctcacattcattgacaagcagttggcagcttatattgcagacaaggtggacgcagctcaaatgcctcaggaagcccagaaaatccaatctgatttgacaagtcatgagatcagtttagaagaaatgaagaaacataatcaggggaaggaggctgcccaaagagtcctgtctcagattgatgttgcacagaaaaaattacaagatgtctccatgaagtttcgattattccagaaaccagccaattttgagcagcgtctacaagaaagtaagatgattttagatgaagtgaagatgcacttgcctgcattggaaacaaagagtgtggaacaggaagtagtacagtcacagctaaatcattgtgtgaacttgtataaaagtctgagtgaagtgaagtctgaagtggaaatggtgataaagactggacgtcagattgtacagaaaaagcagacggaaaatcccaaagaacttgatgaaagagtaacagctttgaaattgcattataatgagctgggagcaaaggtaacagaaagaaagcaacagttggagaaatgcttgaaattgtcccgtaagatgcgaaaggaaatgaatgtcttgacagaatggctggcagctacagatatggaattgacaaagagatcagcagttgaaggaatgcctagtaatttggattctgaagttgcctggggaaaggctactcaaaaagagattgagaaacagaaggtgcacctgaagagtatcacagaggtaggagaggccttgaaaacagttttgggcaagaaggagacgttggtggaagataaactcagtcttctgaatagtaactggatagctgtcacctcccgagcagaagagtggttaaatcttttgttggaataccagaaacacatggaaacttttgaccagaatgtggaccacatcacaaagtggatcattcaggctgacacacttttggatgaatcagagaaaaagaaaccccagcaaaaagaagacgtgcttaagcgtttaaaggcagaactgaatgacatacgcccaaaggtggactctacacgtgaccaagcagcaaacttgatggcaaaccgcggtgaccactgcaggaaattagtagagccccaaatctcagagctcaaccatcgatttgcagccatttcacacagaattaagactggaaaggcctccattcctttgaaggaattggagcagtttaactcagatatacaaaaattgcttgaaccactggaggctgaaattcagcagggggtgaatctgaaagaggaagacttcaataaagatatgaatgaagacaatgagggtactgtaaaagaattgttgcaaagaggagacaacttacaacaaagaatcacagatgagagaaagcgagaggaaataaagataaaacagcagctgttacagacaaaacataatgctctcaaggatttgaggtctcaaagaagaaaaaaggctctagaaatttctcatcagtggtatcagtacaagaggcaggctgatgatctcctgaaatgcttggatgacattgaaaaaaaattagccagcctacctgagcccagagatgaaaggaaaataaaggaaattgatcgggaattgcagaagaagaaagaggagctgaatgcagtgcgtaggcaagctgagggcttgtctgaggatggggccgcaatggcagtggagccaactcagatccagctcagcaagcgctggcgggaaattgagagcaaatttgctcagtttcgaagactcaactttgcacaaattcacactgtccgtgaagaaacgatgatggtgatgactgaagacatgcctttggaaatttcttatgtgccttctacttatttgactgaaatcactcatgtctcacaagccctattagaagtggaacaacttctcaatgctcctgacctctgtgctaaggactttgaagatctctttaagcaagaggagtctctgaagaatataaaagatagtctacaacaaagctcaggtcggattgacattattcatagcaagaagacagcagcattgcaaagtgcaacgcctgtggaaagggtgaagctacaggaagctctctcccagcttgatttccaatgggaaaaagttaacaaaatgtacaaggaccgacaagggcgatttgacagatctgttgagaaatggcggcgttttcattatgatataaagatatttaatcagtggctaacagaagctgaacagtttctcagaaagacacaaattcctgagaattgggaacatgctaaatacaaatggtatcttaaggaactccaggatggcattgggcagcggcaaactgttgtcagaacattgaatgcaactggggaagaaataattcagcaatcctcaaaaacagatgccagtattctacaggaaaaattgggaagcctgaatctgcggtggcaggaggtctgcaaacagctgtcagacagaaaaaagaggctagaagaacaaaagaatatcttgtcagaatttcaaagagatttaaatgaatttgttttatggttggaggaagcagataacattgctagtatcccacttgaacctggaaaagagcagcaactaaaagaaaagcttgagcaagtcaagttactggtggaagagttgcccctgcgccagggaattctcaaacaattaaatgaaactggaggacccgtgcttgtaagtgctcccataagcccagaagagcaagataaacttgaaaataagctcaagcagacaaatctccagtggataaaggtttccagagctttacctgagaaacaaggagaaattgaagctcaaataaaagaccttgggcagcttgaaaaaaagcttgaagaccttgaagagcagttaaatcatctgctgctgtggttatctcctattaggaatcagttggaaatttataaccaaccaaaccaagaaggaccatttgacgttcaggaaactgaaatagcagttcaagctaaacaaccggatgtggaagagattttgtctaaagggcagcatttgtacaaggaaaaaccagccactcagccagtgaagaggaagttagaagatctgagctctgagtggaaggcggtaaaccgtttacttcaagagctgagggcaaagcagcctgacctagctcctggactgaccactattggagcctctcctactcagactgttactctggtgacacaacctgtggttactaaggaaactgccatctccaaactagaaatgccatcttccttgatgttggaggtacctgctctggcagatttcaaccgggcttggacagaacttaccgactggctttctctgcttgatcaagttataaaatcacagagggtgatggtgggtgaccttgaggatatcaacgagatgatcatcaagcagaaggcaacaatgcaggatttggaacagaggcgtccccagttggaagaactcattaccgctgcccaaaatttgaaaaacaagaccagcaatcaagaggctagaacaatcattacggatcgaattgaaagaattcagaatcagtgggatgaagtacaagaacaccttcagaaccggaggcaacagttgaatgaaatgttaaaggattcaacacaatggctggaagctaaggaagaagctgagcaggtcttaggacaggccagagccaagcttgagtcatggaaggagggtccctatacagtagatgcaatccaaaagaaaatcacagaaaccaagcagttggccaaagacctccgccagtggcagacaaatgtagatgtggcaaatgacttggccctgaaacttctccgggattattctgcagatgataccagaaaagtccacatgataacagagaatatcaatgcctcttggagaagcattcataaaagggtgagtgagcgagaggctgctttggaagaaactcatagattactgcaacagttccccctggacctggaaaagtttcttgcctggcttacagaagctgaaacaactgccaatgtcctacaggatgctacccgtaaggaaaggctcctagaagactccaagggagtaaaagagctgatgaaacaatggcaagacctccaaggtgaaattgaagctcacacagatgtttatcacaacctggatgaaaacagccaaaaaatcctgagatccctggaaggttccgatgatgcagtcctgttacaaagacgtttggataacatgaacttcaagtggagtgaacttcggaaaaagtctctcaacattaggtcccatttggaagccagttctgaccagtggaagcgtctgcacctttctctgcaggaacttctggtgtggctacagctgaaagatgatgaattaagccggcaggcacctattggaggcgactttccagcagttcagaagcagaacgatgtacatagggccttcaagagggaattgaaaactaaagaacctgtaatcatgagtactcttgagactgtacgaatatttctgacagagcagcctttggaaggactagagaaactctaccaggagcccagagagctgcctcctgaggagagagcccagaatgtcactcggcttctacgaaagcaggctgaggaggtcaatactgagtgggaaaaattgaacctgcactccgctgactggcagagaaaaatagatgagacccttgaaagactccaggaacttcaagaggccacggatgagctggacctcaagctgcgccaagctgaggtgatcaagggatcctggcagcccgtgggcgatctcctcattgactctctccaagatcacctcgagaaagtcaaggcacttcgaggagaaattgcgcctctgaaagagaacgtgagccacgtcaatgaccttgctcgccagcttaccactttgggcattcagctctcaccgtataacctcagcactctggaagacctgaacaccagatggaagcttctgcaggtggccgtcgaggaccgagtcaggcagctgcatgaagcccacagggactttggtccagcatctcagcactttctttccacgtctgtccagggtccctgggagagagccatctcgccaaacaaagtgccctactatatcaaccacgagactcaaacaacttgctgggaccatcccaaaatgacagagctctaccagtctttagctgacctgaataatgtcagattctcagcttataggactgccatgaaactccgaagactgcagaaggccctttgcttggatctcttgagcctgtcagctgcatgtgatgccttggaccagcacaacctcaagcaaaatgaccagcccatggatatcctgcagattattaattgtttgaccactatttatgaccgcctggagcaagagcacaacaatttggtcaacgtccctctctgcgtggatatgtgtctgaactggctgctgaatgtttatgatacgggacgaacagggaggatccgtgtcctgtcttttaaaactggcatcatttccctgtgtaaagcacatttggaagacaagtacagataccttttcaagcaagtggcaagttcaacaggattttgtgaccagcgcaggctgggcctccttctgcatgattctatccaaattccaagacagttgggtgaagttgcatcctttgggggcagtaacattgagccaagtgtccggagctgcttccaatttgctaataataagccagagatcgaagcggccctcttcctagactggatgagactggaaccccagtccatggtgtggctgcccgtcctgcacagagtggctgctgcagaaactgccaagcatcaggccaaatgtaacatctgcaaagagtgtccaatcattggattcaggtacaggagtctaaagcactttaattatgacatctgccaaagctgctttttttctggtcgagttgcaaaaggccataaaatgcactatcccatggtggaatattgcactccgactacatcaggagaagatgttcgagactttgccaaggtactaaaaaacaaatttcgaaccaaaaggtattttgcgaagcatccccgaatgggctacctgccagtgcagactgtcttagagggggacaacatggaaactcccgttactctgatcaacttctggccagtagattctgcgcctgcctcgtcccctcagctttcacacgatgatactcattcacgcattgaacattatgctagcaggctagcagaaatggaaaacagcaatggatcttatctaaatgatagcatctctcctaatgagagcatagatgatgaacatttgttaatccagcattactgccaaagtttgaaccaggactcccccctgagccagcctcgtagtcctgcccagatcttgatttccttagagagtgaggaaagaggggagctagagagaatcctagcagatcttgaggaagaaaacaggaatctgcaagcagaatatgaccgtctaaagcagcagcacgaacataaaggcctgtccccactgccgtcccctcctgaaatgatgcccacctctccccagagtccccgggatgctgagctcattgctgaggccaagctactgcgtcaacacaaaggccgcctggaagccaggatgcaaatcctggaagaccacaataaacagctggagtcacagttacacaggctaaggcagctgctggagcaaccccaggcagaggccaaagtgaatggcacaacggtgtcctctccttctacctctctacagaggtccgacagcagtcagcctatgctgctccgagtggttggcagtcaaacttcggactccatgggtgaggaagatcttctcagtcctccccaggacacaagcacagggttagaggaggtgatggagcaactcaacaactccttccctagttcaagaggaagaaatacccctggaaagccaatgagagaggacacaatgtaggaagtcttttccacatggcagatgatttgggcagagcgatggagtccttagtatcagtcatgacagatgaagaaggagcagaataaatgttttacaactcctgattcccgcatggtttttataatattcatacaacaaagaggattagacagtaagagtttacaagaaataaatctatatttttgtgaagggtagtggtattatactgtagatttcagtagtttctaagtctgttattgttttgttaacaatggcaggttttacacgtctatgcaattgtacaaaaaagttataagaaaactacatgtaaaatcttgatagctaaataacttgccatttctttatatggaacgcattttgggttgtttaaaaatttataacagttataaagaaagattgtaaactaaagtgtgctttataaaaaaaagttgtttataaaaacccctaaaaacaaaacaaacacacacacacacacatacacacacacacacaaaactttgaggcagcgcattgttttgcatccttttggcgtgatatccatatgaaattcatggctttttctttttttgcatattaaagataagacttcctctaccaccacaccaaatgactactacacactgctcatttgagaactgtcagctgagtggggcaggcttgagttttcatttcatatatctatatgtctataagtatataaatactatagttatatagataaagagatacgaatttctatagactgactttttccattttttaaatgttcatgtcacatcctaatagaaagaaattacttctagtcagtcatccaggcttacctgcttggtctagaatggatttttcccggagccggaagccaggaggaaactacaccacactaaaacattgtctacagctccagatgtttctcattttaaacaactttccactgacaacgaaagtaaagtaaagtattggatttttttaaagggaacatgtgaatgaatacacaggacttattatatcagagtgagtaatcggttggttggttgattgattgattgattgatacattcagcttcctgctgctagcaatgccacgatttagatttaatgatgcttcagtggaaatcaatcagaaggtattctgaccttgtgaacatcagaaggtattttttaactcccaagcagtagcaggacgatgatagggctggagggctatggattcccagcccatccctgtgaaggagtaggccactctttaagtgaaggattggatgattgttcataatacataaagttctctgtaattacaactaaattattatgccctcttctcacagtcaaaaggaactgggtggtttggtttttgttgcttttttagatttattgtcccatgtgggatgagtttttaaatgccacaagacataatttaaaataaataaactttgggaaaaggtgtaaaacagtagccccatcacatttgtgatactgacaggtatcaacccagaagcccatgaactgtgtttccatcctttgcatttctctgcgagtagttccacacaggtttgtaagtaagtaagaaagaaggcaaattgattcaaatgttacaaaaaaacccttcttggtggattagacaggttaaatatataaacaaacaaacaaaaattgctcaaaaaagaggagaaaagctcaagaggaaaagctaaggactggtaggaaaaagctttactctttcatgccattttatttctttttgatttttaaatcattcattcaatagataccaccgtgtgacctataattttgcaaatctgttacctctgacatcaagtgtaattagcttttggagagtgggctgacatcaagtgtaattagcttttggagagtgggttttgtccattattaataattaattaattaacatcaaacacggcttctcatgctatttctacctcactttggttttggggtgttcctgataattgtgcacacctgagttcacagcttcaccacttgtccattgcgttattttctttttcctttataattctttctttttccttcataattttcaaaagaaaacccaaagctctaaggtaacaaattaccaaattacatgaagatttggtttttgtcttgcatttttttcctttatgtgacgctggaccttttctttacccaaggatttttaaaactcagatttaaaacaaggggttactttacatcctactaagaagtttaagtaagtaagtttcattctaaaatcagaggtaaatagagtgcataaataattttgttttaatctttttgtttttcttttagacacattagctctggagtgagtctgtcataatatttgaacaaaaattgagagctttattgctgcattttaagcataattaatttggacattatttcgtgttgtgttctttataaccaccaagtattaaactgtaaatcataatgtaactgaagcataaacatcacatggcatgttttgtcattgttttcaggtactgagttcttacttgagtatcataatatattgtgttttaacaccaacactgtaacatttacgaattatttttttaaacttcagttttactgcattttcacaacatatcagacttcaccaaatatatgccttactattgtattatagtactgctttactgtgtatctcaataaagcacgcagttatgttac

SEQ ID NO: 16 - DNA, 9914 bp, Homo sapiens
taatgagatcaggaggaacattcgacctgagaaagacagattgcaatgactgagatgattttgctaattttttttccagcctatttccttaatgtacgtgatattgtgattgattttcatgcagagatccctgatcctatagttttgtttgctatttatttttctccttcacattttttttctatcaacagagctgaatgagtgccaggaagctgcgaaatctgtcttacaaaaaggctgtaaggaggcaaaagttgcttgaacagagcatccagtctgcccaggagactgaaaaatccttacacttaatccaggagtccctcacattcattgacaagcagttggcagcttatattgcagacaaggtggacgcagctcaaatgcctcaggaagcccagaaaatccaatctgatttgacaagtcatgagatcagtttagaagaaatgaagaaacataatcaggggaaggaggctgcccaaagagtcctgtctcagattgatgttgcacagaaaaaattacaagatgtctccatgaagtttcgattattccagaaaccagccaattttgagcagcgtctacaagaaagtaagatgattttagatgaagtgaagatgcacttgcctgcattggaaacaaagagtgtggaacaggaagtagtacagtcacagctaaatcattgtgtgaacttgtataaaagtctgagtgaagtgaagtctgaagtggaaatggtgataaagactggacgtcagattgtacagaaaaagcagacggaaaatcccaaagaacttgatgaaagagtaacagctttgaaattgcattataatgagctgggagcaaaggtaacagaaagaaagcaacagttggagaaatgcttgaaattgtcccgtaagatgcgaaaggaaatgaatgtcttgacagaatggctggcagctacagatatggaattgacaaagagatcagcagttgaaggaatgcctagtaatttggattctgaagttgcctggggaaaggctactcaaaaagagattgagaaacagaaggtgcacctgaagagtatcacagaggtaggagaggccttgaaaacagttttgggcaagaaggagacgttggtggaagataaactcagtcttctgaatagtaactggatagctgtcacctcccgagcagaagagtggttaaatcttttgttggaataccagaaacacatggaaacttttgaccagaatgtggaccacatcacaaagtggatcattcaggctgacacacttttggatgaatcagagaaaaagaaaccccagcaaaaagaagacgtgcttaagcgtttaaaggcagaactgaatgacatacgcccaaaggtggactctacacgtgaccaagcagcaaacttgatggcaaaccgcggtgaccactgcaggaaattagtagagccccaaatctcagagctcaaccatcgatttgcagccatttcacacagaattaagactggaaaggcctccattcctttgaaggaattggagcagtttaactcagatatacaaaaattgcttgaaccactggaggctgaaattcagcagggggtgaatctgaaagaggaagacttcaataaagatatgaatgaagacaatgagggtactgtaaaagaattgttgcaaagaggagacaacttacaacaaagaatcacagatgagagaaagcgagaggaaataaagataaaacagcagctgttacagacaaaacataatgctctcaaggatttgaggtctcaaagaagaaaaaaggctctagaaatttctcatcagtggtatcagtacaagaggcaggctgatgatctcctgaaatgcttggatgacattgaaaaaaaattagccagcctacctgagcccagagatgaaaggaaaataaaggaaattgatcgggaattgcagaagaagaaagaggagctgaatgcagtgcgtaggcaagctgagggcttgtctgaggatggggccgcaatggcagtggagccaactcagatccagctcagcaagcgctggcgggaaattgagagcaaatttgctcagtttcgaagactcaactttgcacaaattcacactgtccgtgaagaaacgatgatggtgatgactgaagacatgcctttggaaatttcttatgtgccttctacttatttgactgaaatcactcatgtctcacaagccctattagaagtggaacaacttctcaatgctcctgacctctgtgctaaggactttgaagatctctttaagcaagaggagtctctgaagaatataaaagatagtctacaacaaagctcaggtcggattgacattattcatagcaagaagacagcagcattgcaaagtgcaacgcctgtggaaagggtgaagctacaggaagctctctcccagcttgatttccaatgggaaaaagttaacaaaatgtacaaggaccgacaagggcgatttgacagatctgttgagaaatggcggcgttttcattatgatataaagatatttaatcagtggctaacagaagctgaacagtttctcagaaagacacaaattcctgagaattgggaacatgctaaatacaaatggtatcttaaggaactccaggatggcattgggcagcggcaaactgttgtcagaacattgaatgcaactggggaagaaataattcagcaatcctcaaaaacagatgccagtattctacaggaaaaattgggaagcctgaatctgcggtggcaggaggtctgcaaacagctgtcagacagaaaaaagaggctagaagaacaaaagaatatcttgtcagaatttcaaagagatttaaatgaatttgttttatggttggaggaagcagataacattgctagtatcccacttgaacctggaaaagagcagcaactaaaagaaaagcttgagcaagtcaagttactggtggaagagttgcccctgcgccagggaattctcaaacaattaaatgaaactggaggacccgtgcttgtaagtgctcccataagcccagaagagcaagataaacttgaaaataagctcaagcagacaaatctccagtggataaaggtttccagagctttacctgagaaacaaggagaaattgaagctcaaataaaagaccttgggcagcttgaaaaaaagcttgaagaccttgaagagcagttaaatcatctgctgctgtggttatctcctattaggaatcagttggaaatttataaccaaccaaaccaagaaggaccatttgacgttcaggaaactgaaatagcagttcaagctaaacaaccggatgtggaagagattttgtctaaagggcagcatttgtacaaggaaaaaccagccactcagccagtgaagaggaagttagaagatctgagctctgagtggaaggcggtaaaccgtttacttcaagagctgagggcaaagcagcctgacctagctcctggactgaccactattggagcctctcctactcagactgttactctggtgacacaacctgtggttactaaggaaactgccatctccaaactagaaatgccatcttccttgatgttggaggtacctgctctggcagatttcaaccgggcttggacagaacttaccgactggctttctctgcttgatcaagttataaaatcacagagggtgatggtgggtgaccttgaggatatcaacgagatgatcatcaagcagaaggcaacaatgcaggatttggaacagaggcgtccccagttggaagaactcattaccgctgcccaaaatttgaaaaacaagaccagcaatcaagaggctagaacaatcattacggatcgaattgaaagaattcagaatcagtgggatgaagtacaagaacaccttcagaaccggaggcaacagttgaatgaaatgttaaaggattcaacacaatggctggaagctaaggaagaagctgagcaggtcttaggacaggccagagccaagcttgagtcatggaaggagggtccctatacagtagatgcaatccaaaagaaaatcacagaaaccaagcagttggccaaagacctccgccagtggcagacaaatgtagatgtggcaaatgacttggccctgaaacttctccgggattattctgcagatgataccagaaaagtccacatgataacagagaatatcaatgcctcttggagaagcattcataaaagggtgagtgagcgagaggctgctttggaagaaactcatagattactgcaacagttccccctggacctggaaaagtttcttgcctggcttacagaagctgaaacaactgccaatgtcctacaggatgctacccgtaaggaaaggctcctagaagactccaagggagtaaaagagctgatgaaacaatggcaagacctccaaggtgaaattgaagctcacacagatgtttatcacaacctggatgaaaacagccaaaaaatcctgagatccctggaaggttccgatgatgcagtcctgttacaaagacgtttggataacatgaacttcaagtggagtgaacttcggaaaaagtctctcaacattaggtcccatttggaagccagttctgaccagtggaagcgtctgcacctttctctgcaggaacttctggtgtggctacagctgaaagatgatgaattaagccggcaggcacctattggaggcgactttccagcagttcagaagcagaacgatgtacatagggccttcaagagggaattgaaaactaaagaacctgtaatcatgagtactcttgagactgtacgaatatttctgacagagcagcctttggaaggactagagaaactctaccaggagcccagagagctgcctcctgaggagagagcccagaatgtcactcggcttctacgaaagcaggctgaggaggtcaatactgagtgggaaaaattgaacctgcactccgctgactggcagagaaaaatagatgagacccttgaaagactccaggaacttcaagaggccacggatgagctggacctcaagctgcgccaagctgaggtgatcaagggatcctggcagcccgtgggcgatctcctcattgactctctccaagatcacctcgagaaagtcaaggcacttcgaggagaaattgcgcctctgaaagagaacgtgagccacgtcaatgaccttgctcgccagcttaccactttgggcattcagctctcaccgtataacctcagcactctggaagacctgaacaccagatggaagcttctgcaggtggccgtcgaggaccgagtcaggcagctgcatgaagcccacagggactttggtccagcatctcagcactttctttccacgtctgtccagggtccctgggagagagccatctcgccaaacaaagtgccctactatatcaaccacgagactcaaacaacttgctgggaccatcccaaaatgacagagctctaccagtctttagctgacctgaataatgtcagattctcagcttataggactgccatgaaactccgaagactgcagaaggccctttgcttggatctcttgagcctgtcagctgcatgtgatgccttggaccagcacaacctcaagcaaaatgaccagcccatggatatcctgcagattattaattgtttgaccactatttatgaccgcctggagcaagagcacaacaatttggtcaacgtccctctctgcgtggatatgtgtctgaactggctgctgaatgtttatgatacgggacgaacagggaggatccgtgtcctgtcttttaaaactggcatcatttccctgtgtaaagcacatttggaagacaagtacagataccttttcaagcaagtggcaagttcaacaggattttgtgaccagcgcaggctgggcctccttctgcatgattctatccaaattccaagacagttgggtgaagttgcatcctttgggggcagtaacattgagccaagtgtccggagctgcttccaatttgctaataataagccagagatcgaagcggccctcttcctagactggatgagactggaaccccagtccatggtgtggctgcccgtcctgcacagagtggctgctgcagaaactgccaagcatcaggccaaatgtaacatctgcaaagagtgtccaatcattggattcaggtacaggagtctaaagcactttaattatgacatctgccaaagctgctttttttctggtcgagttgcaaaaggccataaaatgcactatcccatggtggaatattgcactccgactacatcaggagaagatgttcgagactttgccaaggtactaaaaaacaaatttcgaaccaaaaggtattttgcgaagcatccccgaatgggctacctgccagtgcagactgtcttagagggggacaacatggaaactcccgttactctgatcaacttctggccagtagattctgcgcctgcctcgtcccctcagctttcacacgatgatactcattcacgcattgaacattatgctagcaggctagcagaaatggaaaacagcaatggatcttatctaaatgatagcatctctcctaatgagagcatagatgatgaacatttgttaatccagcattactgccaaagtttgaaccaggactcccccctgagccagcctcgtagtcctgcccagatcttgatttccttagagagtgaggaaagaggggagctagagagaatcctagcagatcttgaggaagaaaacaggaatctgcaagcagaatatgaccgtctaaagcagcagcacgaacataaaggcctgtccccactgccgtcccctcctgaaatgatgcccacctctccccagagtccccgggatgctgagctcattgctgaggccaagctactgcgtcaacacaaaggccgcctggaagccaggatgcaaatcctggaagaccacaataaacagctggagtcacagttacacaggctaaggcagctgctggagcaaccccaggcagaggccaaagtgaatggcacaacggtgtcctctccttctacctctctacagaggtccgacagcagtcagcctatgctgctccgagtggttggcagtcaaacttcggactccatgggtgaggaagatcttctcagtcctccccaggacacaagcacagggttagaggaggtgatggagcaactcaacaactccttccctagttcaagaggaagaaatacccctggaaagccaatgagagaggacacaatgtaggaagtcttttccacatggcagatgatttgggcagagcgatggagtccttagtatcagtcatgacagatgaagaaggagcagaataaatgttttacaactcctgattcccgcatggtttttataatattcatacaacaaagaggattagacagtaagagtttacaagaaataaatctatatttttgtgaagggtagtggtattatactgtagatttcagtagtttctaagtctgttattgttttgttaacaatggcaggttttacacgtctatgcaattgtacaaaaaagttataagaaaactacatgtaaaatcttgatagctaaataacttgccatttctttatatggaacgcattttgggttgtttaaaaatttataacagttataaagaaagattgtaaactaaagtgtgctttataaaaaaaagttgtttataaaaacccctaaaaacaaaacaaacacacacacacacacatacacacacacacacaaaactttgaggcagcgcattgttttgcatccttttggcgtgatatccatatgaaattcatggctttttctttttttgcatattaaagataagacttcctctaccaccacaccaaatgactactacacactgctcatttgagaactgtcagctgagtggggcaggcttgagttttcatttcatatatctatatgtctataagtatataaatactatagttatatagataaagagatacgaatttctatagactgactttttccattttttaaatgttcatgtcacatcctaatagaaagaaattacttctagtcagtcatccaggcttacctgcttggtctagaatggatttttcccggagccggaagccaggaggaaactacaccacactaaaacattgtctacagctccagatgtttctcattttaaacaactttccactgacaacgaaagtaaagtaaagtattggatttttttaaagggaacatgtgaatgaatacacaggacttattatatcagagtgagtaatcggttggttggttgattgattgattgattgatacattcagcttcctgctgctagcaatgccacgatttagatttaatgatgcttcagtggaaatcaatcagaaggtattctgaccttgtgaacatcagaaggtattttttaactcccaagcagtagcaggacgatgatagggctggagggctatggattcccagcccatccctgtgaaggagtaggccactctttaagtgaaggattggatgattgttcataatacataaagttctctgtaattacaactaaattattatgccctcttctcacagtcaaaaggaactgggtggtttggtttttgttgcttttttagatttattgtcccatgtgggatgagtttttaaatgccacaagacataatttaaaataaataaactttgggaaaaggtgtaaaacagtagccccatcacatttgtgatactgacaggtatcaacccagaagcccatgaactgtgtttccatcctttgcatttctctgcgagtagttccacacaggtttgtaagtaagtaagaaagaaggcaaattgattcaaatgttacaaaaaaacccttcttggtggattagacaggttaaatatataaacaaacaaacaaaaattgctcaaaaaagaggagaaaagctcaagaggaaaagctaaggactggtaggaaaaagctttactctttcatgccattttatttctttttgatttttaaatcattcattcaatagataccaccgtgtgacctataattttgcaaatctgttacctctgacatcaagtgtaattagcttttggagagtgggctgacatcaagtgtaattagcttttggagagtgggttttgtccattattaataattaattaattaacatcaaacacggcttctcatgctatttctacctcactttggttttggggtgttcctgataattgtgcacacctgagttcacagcttcaccacttgtccattgcgttattttctttttcctttataattctttctttttccttcataattttcaaaagaaaacccaaagctctaaggtaacaaattaccaaattacatgaagatttggtttttgtcttgcatttttttcctttatgtgacgctggaccttttctttacccaaggatttttaaaactcagatttaaaacaaggggttactttacatcctactaagaagtttaagtaagtaagtttcattctaaaatcagaggtaaatagagtgcataaataattttgttttaatctttttgtttttcttttagacacattagctctggagtgagtctgtcataatatttgaacaaaaattgagagctttattgctgcattttaagcataattaatttggacattatttcgtgttgtgttctttataaccaccaagtattaaactgtaaatcataatgtaactgaagcataaacatcacatggcatgttttgtcattgttttcaggtactgagttcttacttgagtatcataatatattgtgttttaacaccaacactgtaacatttacgaattatttttttaaacttcagttttactgcattttcacaacatatcagacttcaccaaatatatgccttactattgtattatagtactgctttactgtgtatctcaataaagcacgcagttatgttac

SEQ ID NO: 17 - DNA, 5623 bp, Homo sapiens
gggttttctcaggattgctatgcaacaggatcagtgctgtagtgcccggttcaagctgaaaatgttacacaggaagacataccatgtaaaggacctccaaggtgaaattgaagctcacacagatgtttatcacaacctggatgaaaacagccaaaaaatcctgagatccctggaaggttccgatgatgcagtcctgttacaaagacgtttggataacatgaacttcaagtggagtgaacttcggaaaaagtctctcaacattaggtcccatttggaagccagttctgaccagtggaagcgtctgcacctttctctgcaggaacttctggtgtggctacagctgaaagatgatgaattaagccggcaggcacctattggaggcgactttccagcagttcagaagcagaacgatgtacatagggccttcaagagggaattgaaaactaaagaacctgtaatcatgagtactcttgagactgtacgaatatttctgacagagcagcctttggaaggactagagaaactctaccaggagcccagagagctgcctcctgaggagagagcccagaatgtcactcggcttctacgaaagcaggctgaggaggtcaatactgagtgggaaaaattgaacctgcactccgctgactggcagagaaaaatagatgagacccttgaaagactccaggaacttcaagaggccacggatgagctggacctcaagctgcgccaagctgaggtgatcaagggatcctggcagcccgtgggcgatctcctcattgactctctccaagatcacctcgagaaagtcaaggcacttcgaggagaaattgcgcctctgaaagagaacgtgagccacgtcaatgaccttgctcgccagcttaccactttgggcattcagctctcaccgtataacctcagcactctggaagacctgaacaccagatggaagcttctgcaggtggccgtcgaggaccgagtcaggcagctgcatgaagcccacagggactttggtccagcatctcagcactttctttccacgtctgtccagggtccctgggagagagccatctcgccaaacaaagtgccctactatatcaaccacgagactcaaacaacttgctgggaccatcccaaaatgacagagctctaccagtctttagctgacctgaataatgtcagattctcagcttataggactgccatgaaactccgaagactgcagaaggccctttgcttggatctcttgagcctgtcagctgcatgtgatgccttggaccagcacaacctcaagcaaaatgaccagcccatggatatcctgcagattattaattgtttgaccactatttatgaccgcctggagcaagagcacaacaatttggtcaacgtccctctctgcgtggatatgtgtctgaactggctgctgaatgtttatgatacgggacgaacagggaggatccgtgtcctgtcttttaaaactggcatcatttccctgtgtaaagcacatttggaagacaagtacagataccttttcaagcaagtggcaagttcaacaggattttgtgaccagcgcaggctgggcctccttctgcatgattctatccaaattccaagacagttgggtgaagttgcatcctttgggggcagtaacattgagccaagtgtccggagctgcttccaatttgctaataataagccagagatcgaagcggccctcttcctagactggatgagactggaaccccagtccatggtgtggctgcccgtcctgcacagagtggctgctgcagaaactgccaagcatcaggccaaatgtaacatctgcaaagagtgtccaatcattggattcaggtacaggagtctaaagcactttaattatgacatctgccaaagctgctttttttctggtcgagttgcaaaaggccataaaatgcactatcccatggtggaatattgcactccgactacatcaggagaagatgttcgagactttgccaaggtactaaaaaacaaatttcgaaccaaaaggtattttgcgaagcatccccgaatgggctacctgccagtgcagactgtcttagagggggacaacatggaaactcccgttactctgatcaacttctggccagtagattctgcgcctgcctcgtcccctcagctttcacacgatgatactcattcacgcattgaacattatgctagcaggctagcagaaatggaaaacagcaatggatcttatctaaatgatagcatctctcctaatgagagcatagatgatgaacatttgttaatccagcattactgccaaagtttgaaccaggactcccccctgagccagcctcgtagtcctgcccagatcttgatttccttagagagtgaggaaagaggggagctagagagaatcctagcagatcttgaggaagaaaacaggaatctgcaagcagaatatgaccgtctaaagcagcagcacgaacataaaggcctgtccccactgccgtcccctcctgaaatgatgcccacctctccccagagtccccgggatgctgagctcattgctgaggccaagctactgcgtcaacacaaaggccgcctggaagccaggatgcaaatcctggaagaccacaataaacagctggagtcacagttacacaggctaaggcagctgctggagcaaccccaggcagaggccaaagtgaatggcacaacggtgtcctctccttctacctctctacagaggtccgacagcagtcagcctatgctgctccgagtggttggcagtcaaacttcggactccatgggtgaggaagatcttctcagtcctccccaggacacaagcacagggttagaggaggtgatggagcaactcaacaactccttccctagttcaagaggaagaaatacccctggaaagccaatgagagaggacacaatgtaggaagtcttttccacatggcagatgatttgggcagagcgatggagtccttagtatcagtcatgacagatgaagaaggagcagaataaatgttttacaactcctgattcccgcatggtttttataatattcatacaacaaagaggattagacagtaagagtttacaagaaataaatctatatttttgtgaagggtagtggtattatactgtagatttcagtagtttctaagtctgttattgttttgttaacaatggcaggttttacacgtctatgcaattgtacaaaaaagttataagaaaactacatgtaaaatcttgatagctaaataacttgccatttctttatatggaacgcattttgggttgtttaaaaatttataacagttataaagaaagattgtaaactaaagtgtgctttataaaaaaaagttgtttataaaaacccctaaaaacaaaacaaacacacacacacacacatacacacacacacacaaaactttgaggcagcgcattgttttgcatccttttggcgtgatatccatatgaaattcatggctttttctttttttgcatattaaagataagacttcctctaccaccacaccaaatgactactacacactgctcatttgagaactgtcagctgagtggggcaggcttgagttttcatttcatatatctatatgtctataagtatataaatactatagttatatagataaagagatacgaatttctatagactgactttttccattttttaaatgttcatgtcacatcctaatagaaagaaattacttctagtcagtcatccaggcttacctgcttggtctagaatggatttttcccggagccggaagccaggaggaaactacaccacactaaaacattgtctacagctccagatgtttctcattttaaacaactttccactgacaacgaaagtaaagtaaagtattggatttttttaaagggaacatgtgaatgaatacacaggacttattatatcagagtgagtaatcggttggttggttgattgattgattgattgatacattcagcttcctgctgctagcaatgccacgatttagatttaatgatgcttcagtggaaatcaatcagaaggtattctgaccttgtgaacatcagaaggtattttttaactcccaagcagtagcaggacgatgatagggctggagggctatggattcccagcccatccctgtgaaggagtaggccactctttaagtgaaggattggatgattgttcataatacataaagttctctgtaattacaactaaattattatgccctcttctcacagtcaaaaggaactgggtggtttggtttttgttgcttttttagatttattgtcccatgtgggatgagtttttaaatgccacaagacataatttaaaataaataaactttgggaaaaggtgtaaaacagtagccccatcacatttgtgatactgacaggtatcaacccagaagcccatgaactgtgtttccatcctttgcatttctctgcgagtagttccacacaggtttgtaagtaagtaagaaagaaggcaaattgattcaaatgttacaaaaaaacccttcttggtggattagacaggttaaatatataaacaaacaaacaaaaattgctcaaaaaagaggagaaaagctcaagaggaaaagctaaggactggtaggaaaaagctttactctttcatgccattttatttctttttgatttttaaatcattcattcaatagataccaccgtgtgacctataattttgcaaatctgttacctctgacatcaagtgtaattagcttttggagagtgggctgacatcaagtgtaattagcttttggagagtgggttttgtccattattaataattaattaattaacatcaaacacggcttctcatgctatttctacctcactttggttttggggtgttcctgataattgtgcacacctgagttcacagcttcaccacttgtccattgcgttattttctttttcctttataattctttctttttccttcataattttcaaaagaaaacccaaagctctaaggtaacaaattaccaaattacatgaagatttggtttttgtcttgcatttttttcctttatgtgacgctggaccttttctttacccaaggatttttaaaactcagatttaaaacaaggggttactttacatcctactaagaagtttaagtaagtaagtttcattctaaaatcagaggtaaatagagtgcataaataattttgttttaatctttttgtttttcttttagacacattagctctggagtgagtctgtcataatatttgaacaaaaattgagagctttattgctgcattttaagcataattaatttggacattatttcgtgttgtgttctttataaccaccaagtattaaactgtaaatcataatgtaactgaagcataaacatcacatggcatgttttgtcattgttttcaggtactgagttcttacttgagtatcataatatattgtgttttaacaccaacactgtaacatttacgaattatttttttaaacttcagttttactgcattttcacaacatatcagacttcaccaaatatatgccttactattgtattatagtactgctttactgtgtatctcaataaagcacgcagttatgttac

SEQ ID NO: 18 - DNA, 1571 bp, Homo sapiens
actttcggggagcccggcggctctgggaagctcactcctccactcgtacccacactcgaccgcggagcccttgcagccatgagggaacagctcaaaggccacgagactcaaacaacttgctgggaccatcccaaaatgacagagctctaccagtctttagctgacctgaataatgtcagattctcagcttataggactgccatgaaactccgaagactgcagaaggccctttgcttggatctcttgagcctgtcagctgcatgtgatgccttggaccagcacaacctcaagcaaaatgaccagcccatggatatcctgcagattattaattgtttgaccactatttatgaccgcctggagcaagagcacaacaatttggtcaacgtccctctctgcgtggatatgtgtctgaactggctgctgaatgtttatgatacgggacgaacagggaggatccgtgtcctgtcttttaaaactggcatcatttccctgtgtaaagcacatttggaagacaagtacagataccttttcaagcaagtggcaagttcaacaggattttgtgaccagcgcaggctgggcctccttctgcatgattctatccaaattccaagacagttgggtgaagttgcatcctttgggggcagtaacattgagccaagtgtccggagctgcttccaatttgctaataataagccagagatcgaagcggccctcttcctagactggatgagactggaaccccagtccatggtgtggctgcccgtcctgcacagagtggctgctgcagaaactgccaagcatcaggccaaatgtaacatctgcaaagagtgtccaatcattggattcaggtacaggagtctaaagcactttaattatgacatctgccaaagctgctttttttctggtcgagttgcaaaaggccataaaatgcactatcccatggtggaatattgcactccgactacatcaggagaagatgttcgagactttgccaaggtactaaaaaacaaatttcgaaccaaaaggtattttgcgaagcatccccgaatgggctacctgccagtgcagactgtcttagagggggacaacatggaaacgtgagtagtagcaaaagcagaacacactcttgtttgatgtatatttgaactcctctcagctgaacaccctccttcactcccaaatgcaaacagtctcttctatttctttctttttatttacattagctgaaaagagaaaaataagctgatgtccagttgccactttcccacgtcacttgacaatttctttttccaaaagttaaactttatctcacagggggaaaaaaaaaaaaaaaccacaacacaatacagccactaattgccttacaagccttataagaaatatgggactgtttacaaatgagtgattccagtatttcattttgattttcctctctcacaaatcagtaaatgtgtgtctttttgtatctcattgtgtggtcatatctagtcacttgtttctactcaaaagaaaatatagtcacaggaaactacttcacagtaagtagtaatgattctcaagatcaaagggga

SEQ ID NO: 19 - DNA, 7378 bp, Homo sapiens
acactagcaatggcaaagctttgtgcggaggcattgctggctgctctgaactaaaagcatccgtggggaccgaaagaggtttttgcacaccttattaaggaactccaggatggcattgggcagcggcaaactgttgtcagaacattgaatgcaactggggaagaaataattcagcaatcctcaaaaacagatgccagtattctacaggaaaaattgggaagcctgaatctgcggtggcaggaggtctgcaaacagctgtcagacagaaaaaagaggctagaagaacaaaagaatatcttgtcagaatttcaaagagatttaaatgaatttgttttatggttggaggaagcagataacattgctagtatcccacttgaacctggaaaagagcagcaactaaaagaaaagcttgagcaagtcaagttactggtggaagagttgcccctgcgccagggaattctcaaacaattaaatgaaactggaggacccgtgcttgtaagtgctcccataagcccagaagagcaagataaacttgaaaataagctcaagcagacaaatctccagtggataaaggtttccagagctttacctgagaaacaaggagaaattgaagctcaaataaaagaccttgggcagcttgaaaaaaagcttgaagaccttgaagagcagttaaatcatctgctgctgtggttatctcctattaggaatcagttggaaatttataaccaaccaaaccaagaaggaccatttgacgttcaggaaactgaaatagcagttcaagctaaacaaccggatgtggaagagattttgtctaaagggcagcatttgtacaaggaaaaaccagccactcagccagtgaagaggaagttagaagatctgagctctgagtggaaggcggtaaaccgtttacttcaagagctgagggcaaagcagcctgacctagctcctggactgaccactattggagcctctcctactcagactgttactctggtgacacaacctgtggttactaaggaaactgccatctccaaactagaaatgccatcttccttgatgttggaggtacctgctctggcagatttcaaccgggcttggacagaacttaccgactggctttctctgcttgatcaagttataaaatcacagagggtgatggtgggtgaccttgaggatatcaacgagatgatcatcaagcagaaggcaacaatgcaggatttggaacagaggcgtccccagttggaagaactcattaccgctgcccaaaatttgaaaaacaagaccagcaatcaagaggctagaacaatcattacggatcgaattgaaagaattcagaatcagtgggatgaagtacaagaacaccttcagaaccggaggcaacagttgaatgaaatgttaaaggattcaacacaatggctggaagctaaggaagaagctgagcaggtcttaggacaggccagagccaagcttgagtcatggaaggagggtccctatacagtagatgcaatccaaaagaaaatcacagaaaccaagcagttggccaaagacctccgccagtggcagacaaatgtagatgtggcaaatgacttggccctgaaacttctccgggattattctgcagatgataccagaaaagtccacatgataacagagaatatcaatgcctcttggagaagcattcataaaagggtgagtgagcgagaggctgctttggaagaaactcatagattactgcaacagttccccctggacctggaaaagtttcttgcctggcttacagaagctgaaacaactgccaatgtcctacaggatgctacccgtaaggaaaggctcctagaagactccaagggagtaaaagagctgatgaaacaatggcaagacctccaaggtgaaattgaagctcacacagatgtttatcacaacctggatgaaaacagccaaaaaatcctgagatccctggaaggttccgatgatgcagtcctgttacaaagacgtttggataacatgaacttcaagtggagtgaacttcggaaaaagtctctcaacattaggtcccatttggaagccagttctgaccagtggaagcgtctgcacctttctctgcaggaacttctggtgtggctacagctgaaagatgatgaattaagccggcaggcacctattggaggcgactttccagcagttcagaagcagaacgatgtacatagggccttcaagagggaattgaaaactaaagaacctgtaatcatgagtactcttgagactgtacgaatatttctgacagagcagcctttggaaggactagagaaactctaccaggagcccagagagctgcctcctgaggagagagcccagaatgtcactcggcttctacgaaagcaggctgaggaggtcaatactgagtgggaaaaattgaacctgcactccgctgactggcagagaaaaatagatgagacccttgaaagactccaggaacttcaagaggccacggatgagctggacctcaagctgcgccaagctgaggtgatcaagggatcctggcagcccgtgggcgatctcctcattgactctctccaagatcacctcgagaaagtcaaggcacttcgaggagaaattgcgcctctgaaagagaacgtgagccacgtcaatgaccttgctcgccagcttaccactttgggcattcagctctcaccgtataacctcagcactctggaagacctgaacaccagatggaagcttctgcaggtggccgtcgaggaccgagtcaggcagctgcatgaagcccacagggactttggtccagcatctcagcactttctttccacgtctgtccagggtccctgggagagagccatctcgccaaacaaagtgccctactatatcaaccacgagactcaaacaacttgctgggaccatcccaaaatgacagagctctaccagtctttagctgacctgaataatgtcagattctcagcttataggactgccatgaaactccgaagactgcagaaggccctttgcttggatctcttgagcctgtcagctgcatgtgatgccttggaccagcacaacctcaagcaaaatgaccagcccatggatatcctgcagattattaattgtttgaccactatttatgaccgcctggagcaagagcacaacaatttggtcaacgtccctctctgcgtggatatgtgtctgaactggctgctgaatgtttatgatacgggacgaacagggaggatccgtgtcctgtcttttaaaactggcatcatttccctgtgtaaagcacatttggaagacaagtacagataccttttcaagcaagtggcaagttcaacaggattttgtgaccagcgcaggctgggcctccttctgcatgattctatccaaattccaagacagttgggtgaagttgcatcctttgggggcagtaacattgagccaagtgtccggagctgcttccaatttgctaataataagccagagatcgaagcggccctcttcctagactggatgagactggaaccccagtccatggtgtggctgcccgtcctgcacagagtggctgctgcagaaactgccaagcatcaggccaaatgtaacatctgcaaagagtgtccaatcattggattcaggtacaggagtctaaagcactttaattatgacatctgccaaagctgctttttttctggtcgagttgcaaaaggccataaaatgcactatcccatggtggaatattgcactccgactacatcaggagaagatgttcgagactttgccaaggtactaaaaaacaaatttcgaaccaaaaggtattttgcgaagcatccccgaatgggctacctgccagtgcagactgtcttagagggggacaacatggaaactcccgttactctgatcaacttctggccagtagattctgcgcctgcctcgtcccctcagctttcacacgatgatactcattcacgcattgaacattatgctagcaggctagcagaaatggaaaacagcaatggatcttatctaaatgatagcatctctcctaatgagagcatagatgatgaacatttgttaatccagcattactgccaaagtttgaaccaggactcccccctgagccagcctcgtagtcctgcccagatcttgatttccttagagagtgaggaaagaggggagctagagagaatcctagcagatcttgaggaagaaaacaggaatctgcaagcagaatatgaccgtctaaagcagcagcacgaacataaaggcctgtccccactgccgtcccctcctgaaatgatgcccacctctccccagagtccccgggatgctgagctcattgctgaggccaagctactgcgtcaacacaaaggccgcctggaagccaggatgcaaatcctggaagaccacaataaacagctggagtcacagttacacaggctaaggcagctgctggagcaaccccaggcagaggccaaagtgaatggcacaacggtgtcctctccttctacctctctacagaggtccgacagcagtcagcctatgctgctccgagtggttggcagtcaaacttcggactccatgggtgaggaagatcttctcagtcctccccaggacacaagcacagggttagaggaggtgatggagcaactcaacaactccttccctagttcaagaggacacaatgtaggaagtcttttccacatggcagatgatttgggcagagcgatggagtccttagtatcagtcatgacagatgaagaaggagcagaataaatgttttacaactcctgattcccgcatggtttttataatattcatacaacaaagaggattagacagtaagagtttacaagaaataaatctatatttttgtgaagggtagtggtattatactgtagatttcagtagtttctaagtctgttattgttttgttaacaatggcaggttttacacgtctatgcaattgtacaaaaaagttataagaaaactacatgtaaaatcttgatagctaaataacttgccatttctttatatggaacgcattttgggttgtttaaaaatttataacagttataaagaaagattgtaaactaaagtgtgctttataaaaaaaagttgtttataaaaacccctaaaaacaaaacaaacacacacacacacacatacacacacacacacaaaactttgaggcagcgcattgttttgcatccttttggcgtgatatccatatgaaattcatggctttttctttttttgcatattaaagataagacttcctctaccaccacaccaaatgactactacacactgctcatttgagaactgtcagctgagtggggcaggcttgagttttcatttcatatatctatatgtctataagtatataaatactatagttatatagataaagagatacgaatttctatagactgactttttccattttttaaatgttcatgtcacatcctaatagaaagaaattacttctagtcagtcatccaggcttacctgcttggtctagaatggatttttcccggagccggaagccaggaggaaactacaccacactaaaacattgtctacagctccagatgtttctcattttaaacaactttccactgacaacgaaagtaaagtaaagtattggatttttttaaagggaacatgtgaatgaatacacaggacttattatatcagagtgagtaatcggttggttggttgattgattgattgattgatacattcagcttcctgctgctagcaatgccacgatttagatttaatgatgcttcagtggaaatcaatcagaaggtattctgaccttgtgaacatcagaaggtattttttaactcccaagcagtagcaggacgatgatagggctggagggctatggattcccagcccatccctgtgaaggagtaggccactctttaagtgaaggattggatgattgttcataatacataaagttctctgtaattacaactaaattattatgccctcttctcacagtcaaaaggaactgggtggtttggtttttgttgcttttttagatttattgtcccatgtgggatgagtttttaaatgccacaagacataatttaaaataaataaactttgggaaaaggtgtaaaacagtagccccatcacatttgtgatactgacaggtatcaacccagaagcccatgaactgtgtttccatcctttgcatttctctgcgagtagttccacacaggtttgtaagtaagtaagaaagaaggcaaattgattcaaatgttacaaaaaaacccttcttggtggattagacaggttaaatatataaacaaacaaacaaaaattgctcaaaaaagaggagaaaagctcaagaggaaaagctaaggactggtaggaaaaagctttactctttcatgccattttatttctttttgatttttaaatcattcattcaatagataccaccgtgtgacctataattttgcaaatctgttacctctgacatcaagtgtaattagcttttggagagtgggctgacatcaagtgtaattagcttttggagagtgggttttgtccattattaataattaattaattaacatcaaacacggcttctcatgctatttctacctcactttggttttggggtgttcctgataattgtgcacacctgagttcacagcttcaccacttgtccattgcgttattttctttttcctttataattctttctttttccttcataattttcaaaagaaaacccaaagctctaaggtaacaaattaccaaattacatgaagatttggtttttgtcttgcatttttttcctttatgtgacgctggaccttttctttacccaaggatttttaaaactcagatttaaaacaaggggttactttacatcctactaagaagtttaagtaagtaagtttcattctaaaatcagaggtaaatagagtgcataaataattttgttttaatctttttgtttttcttttagacacattagctctggagtgagtctgtcataatatttgaacaaaaattgagagctttattgctgcattttaagcataattaatttggacattatttcgtgttgtgttctttataaccaccaagtattaaactgtaaatcataatgtaactgaagcataaacatcacatggcatgttttgtcattgttttcaggtactgagttcttacttgagtatcataatatattgtgttttaacaccaacactgtaacatttacgaattatttttttaaacttcagttttactgcattttcacaacatatcagacttcaccaaatatatgccttactattgtattatagtactgctttactgtgtatctcaataaagcacgcagttatgttac

SEQ ID NO: 20 - DNA, 8909 bp, Homo sapiens
agcactgctgctctcccggcttcccgctctactccggccgggccgggtccgccacgtctggcgcgctgagcaggcccggccgcgcagcgcctaccctttcctcgctccgggccggcagtgtggggcggcgcgctgggggcgcggcgtgtctggggacatcttgtgatgttggcgagaacaggacatgatctcacatggcgagaagctctttagttccttaatcatttcacggtgccttcggacgctttttttccacctaaaacgtttagtttcagctcagtgatcagctaccccagctcggcgggggagcggaaggcttgaattattccgacctgtgagcggcccctggcaccaaaaaaaaaaaaaaaaaaaaaaaaaaaagaaaaaaaaaggcacaaaaaagtggaaacttttccctgtccattccatcaagtcctgaaaaatcaaaatggatttagagaaaaattatccgactcctcggaccagcaggacaggacatggaggagtgaatcagcttgggggggtttttgtgaatggacggccactcccggatgtagtccgccagaggatagtggaacttgctcatcaaggtgtcaggccctgcgacatctccaggcagcttcgggtcagccatggttgtgtcagcaaaattcttggcaggtattatgagacaggaagcatcaagcctggggtaattggaggatccaaaccaaaggtcgccacacccaaagtggtggaaaaaatcgctgaatataaacgccaaaatcccaccatgtttgcctgggagatcagggaccggctgctggcagagcgggtgtgtgacaatgacaccgtgcctagcgtcagttccatcaacaggatcatccggacaaaagtacagcagccacccaaccaaccagtcccagcttccagtcacagcatagtgtccactggctccgtgacgcaggtgtcctcggtgagcacggattcggccggctcgtcgtactccatcagcggcatcctgggcatcacgtcccccagcgccgacaccaacaagcgcaagagagacgaaggtattcaggagtctccggtgccgaacggccactcgcttccgggcagagacttcctccggaagcagatgcggggagacttgttcacacagcagcagctggaggtgctggaccgcgtgtttgagaggcagcactactcagacatcttcaccaccacagagcccatcaagcccgagcagaccacagagtattcagccatggcctcgctggctggtgggctggacgacatgaaggccaatctggccagccccacccctgctgacatcgggagcagtgtgccaggcccgcagtcctaccccattgtgacaggccgtgacttggcgagcacgaccctccccgggtaccctccacacgtcccccccgctggacagggcagctactcagcaccgacgctgacagggatggtgcctgggagtgagttttccgggagtccctacagccaccctcagtattcctcgtacaacgactcctggaggttccccaacccggggctgcttggctccccctactattatagcgctgccgcccgaggagccgccccacctgcagccgccactgcctatgaccgtcactgacccttggagccaggcgggcaccaaacactgatggcacctattgagggtgacagccacccagccctcctgaagatagccagagagcccatgagaccgtcccccagcatcccccacttgcctgaagctcccctcttcctctcttcctccagggactctggggccctttggtggggccgttggacttctggatgcttgtctatttctaaaagccaatctatgagcttctcccgatggccactgggtctctgcaaaccaatagactgtcctgcaaataaccgcagccccagcccagcctgcctgtcctccagctgtctgactatccatccatcataaccaccccagcctgggaaggagagcttgcttttgttgcttcagcagcacccatgtaaataccttcttgcttttctgtgggcctgaaggtccgactgagaagactgctccacccatgatgcatctcgcactcttggtgcatcaccggacatcttagacctatggcagagcatcctctctgccctgggtgaccctggcaggtgcgctcagagctgtcctcaagatggaggatgctgcccttgggccccagcctcctgctcatccctccttctttagtatctttacgaggagtctcactgggctggttgtgctgcaggctccccctgaggcccctctccaagaggagcacactttggggagatgtcctggtttcctgcctccatttctctgggaccgatgcagtatcagcagctcttttccagatcaaagaactcaaagaaaactgtctgggagattcctcagctacttttccgaagcagaatgtcatccgaggtattgattacattgtggactttgaatgtgagggctggatgggacgcaggagatcatctgatcccagccaaggaggggcctgaggctctccctactccctcagcccctggaacggtgttttctgaggcatgcccaggttcaggtcacttcggacacctgccatggacacttcacccaccctccaggaccccagcaagtggattctgggcaagcctgttccggtgatgtagacaataattaacacagaggactttcccccacacccagatcacaaacagcctacagccagaacttctgagcatcctctcggggcagaccctccccgtcctcgtggagcttagcaggcagctgggcatggaggtgctggggctggggcagatgcctaatttcgcacaatgcatgcccacctgttgatctaaggggccgcgatggtcagggccacggccaagggccacgggaacttggagagggagcttggagaactcactgtgggctagggtggtcagaggaagccagcagggaagatctgggggacagaggaaggcctcctgagggaggggcaggagagcagtgaggagctgctgtgtgacctgggagtgattttgacatgggggtgccaggtgccatcatctctttacctggggccttaattccttgcatagtctctcttgtcaagtcagaacagccaggtagagcccttgtccaaacctgggctgaatgacagtgatgagagggggcttggccttcttaggtgacaatgtcccccatatctgtatgtcaccaggatggcagagagccagggcagagagagactggacttgggatcagcaggccaggcaggtcttgtcctggtcctggccacatgtctttgctgtgggacctcagacaaaaccctgcacctctttgagccttggctgccttggtgcagcagggtcatctgtagggccaccccacagctctttccttcccctcctctctccagggagccggggctgtgagaggatcatctggggcaggccctccacttccaagcaagcagatgggggtgggcacctgaggcccaataatatttggaccaagtgggaaacaagaacactcggaggggcgggaatcagaagagcctggaaaaagacctagcccaacttcccttgtgggaaactgaggcccagcttggggaaggccaggaccatgcagggagaaaaagcagacttcctctggccaccgctaagtattttgttccctaagtcccccacagggtggtggaacagaagagaaaactaaggctcagcaaggtggagtcctcaagcagtgactggtgggggtggggctgggactcgggctcctgacccccaacccatggtgttccctgtcaccctggtctatccacatctcctattcctgaggagagttgacagtaagagcagtgagagatggttctgggccccatgccctagacaatcagtctgtaagaactgccaaggaagcctggtcacccaggccagggatggagcccagcgagctcacagcaggcacatgcacccccgcccccacccagaacctgcggggcaaagaagggaggtagttggggccagagtccacctccaggagccagggtgagctggctgcagcttccacctgtcaggtaaggtaggagaaggtatgttacctggcatctctctccctgcctccctccatttagcaggaagtggtggggtcaggggtcttcagcacagacttcttgagcctctgccccctgtcacccttcttttggaatgatgtgtacccacatctttggatcctgccctccttgtggttccaggctgttgggaggaggtcagcctcccctgaaccagctgcctgaggcatgcagcatccttcctcggcaaagcccacctggctcacagcggccccctctccccatcctgttcctcttcttgccctgtaatgagctccccccatacctttcctccctcacctgaggctttgctggtcctcagattggttttgtatttgtgagacaaccacttgactcctgggctgccaggcggaagcacaagcgcacatggatgcacacggatgttctcacacacacacgcccgctctcaccaattcacagcacctcgtggtccagcggagctgcctgggagcttggtgaggatggctccaaaggacacaagccgttgagtagatgccagagaattctgaatggaaaacacaagtccggggcctcaccagcatcgtggcagaaggcctggggcatttctccatgggccttcttccctgtgttcgagctctgacttttggaaaaggacattgtggattttatgaaaatttctcataccatcagtctagctccaacctagaaaaattggatgatatatcaaacccaacatccctttcccaaggcaccttagttaaggctagcccttccataactgacattgtacggtgctttgcaatcctcaaccactctgtggagcaaagagcatgatgcctactttatagacggggaaattgacatttggggctctcacggcaacatagaggcgaagtgaattctcagatctccaggccccattctctctccaccgagttgtgctcctgtcatgggagtgtatggcttaaagacactcccccacccccattccctagaaatcccccagacccacaatcaggcaagaaagaacagggacccagaggctggcctgacctaggggcctgcaggttggcggctttgtttcctaagaacattgaaacctgcggagtctttgaccaaatccacaacagtgcttctgaggtttcatccagactctttcccagctgtccctgaggttcagagggtatcagagtcaattcaaggccatgccataatccctgaccaggcctggacatgggtccagccctgactccaggggtccaggtgccaaggtcatgtgctgtcccccacttccctttctttgccttcgcactttggaacaggctccaggcctggctgtgacagtatgcaggagtgcccaagccagggccaccagggtgtccacagcccctggaaacacagatcacaatctcaagtcccctgaatgaactgcttcctgggtgaacggggtggtgtagccttgccactcgggcagcgcaccagacagtacggtgcagcagtgcccgagatgcccagaagtgtgcctgcccccctgagtggcattcaagtatgaaaacttgtaaaattttctgtcggcctaaagaaaaatgtccatgggccaaacttgacccactgggcaccagcctgtgagccccaatgcctgtcaattgccccctttctcattcacctcctgtcctttgttgcagatttggaggagatgggagcccagagaggtgagagatgtgcttcagggtgtccagcaaggcaggggtagaaacgggcacgcccagagcctgccactctcccaggcctcatcttgggctcttgcaagtcttgcgctttgaagatggagttgggtggaaggtcagaggcgctggggacgggattggggagctgctgggttttcaggggaggtcagtgctgcttgggcacctttcacatgtgcagggaagagactcagatgtggccacagggcactgaggggtgaaatccatttaccagaagtcacgctccagaacgactgcccagccttggcagccagtggctccagccaccccctcctcatgacattcagccagaattgagctccaagccagggaagcaaatcttaaaaaccaaccaagcaccctgacacagccctagaaacacgatgagtctgaaatacagcttcccaggaggggagtctaagatacagcttcccgggagggtggaaaccaactcctgccccacggccaggccaggcccaggcaggcatgggtggatcccacagggctctgagctagaccggctccacggtggccccactacgaggccagttctgcagtcttggccttgtcacccatcgagaggctgctctgatggttcccagccacacaccagctctcctggggaaactatttctttcgttcttttggcctcggagaggtccgaggcaagtacatttcttaaaaggtaataaaatgcattattggaaagttggacagtcaggccacgactcctagcccacggcgtgccccacctcccagcagccccttcagccccttgcccctgttgccccaaacctcagggttccctcttgcatattcatgggggaaccacagtgctgatgtgtacttccccactgtcagctcggctgcacctcgtgtggcgccaggtcccaagggcctctgcagaggccaggctgtgagccccttgcctgcctgctcccctgatgaggcaacagcttctctgaaatgagctgccggccaggagcaggcaggcaccagcctgtctttccttttctggtaattcctcagcactgaggctccgttcctgggcaccccaggattgaagggaacctcagaatcatgtcactgccattctagagtttcaatccaaggggtcccctttagctcatctccaagatgggtaaacgtagccaccattcagaaagcccagaaattcttgttcccacatcttagacccctgagcaacacaaggagaaaatgcagctgcttacctattaatatctactgagggacaatcagcaaagcctcaaaggagtcgtctcaggtagggtacttggcctgtggcaggagagacagaggcacaaacccacccacccatcagcttccggtggctgatcggggcccagggagggaagcaggtgaaacagcagggtgggggtgacttggcagtcgtgcatctcctccccgactctgaggcctggcaggaggaggccacaccagcctcacctgccctgacccccgccccccaccctgtgaccctgtggctatggccgctggtcgcccttgtccccaaaatcaccatgcctgtggccacgtccctcatcttctccaaaagcatcattaagaacaagtgattttggatgatggatttttgatttacaaacggcgcatttcccttggagtggaacagaaaggaaaccatttaatggcgcccttcttttcaagcatgaatacattttaatgaaactattttattgtatttgaggaaatggagagttgaacattccaaccaatcaatagccaattaattgctataaagctaaaaagaaaataaataaatcctgagtctattttaaacactgcaaaaagttcagagcctcagaatctggccttcccctccataaggtgcacgagcatgtaaacacacacacacacacacacacacacacacacacactcactcactcccctacacctcagacatacttgaaactcagaaacagcactgagtctccccatgccaattcttgcctgctgtcttcgacttgggtcagagaaggtgagcagacccggcagcagcctgtcccggggctcaggaagaggcaggcccatcccctggccccaagcacccagcacaacagagggtggcgggcagtgagggcctggcgttgcctgggccccacttctcagccccagctgctgggcctccaaggttgggctgaggatggagttttggctctgggtttgccctgactcctgctggaagacgctgccctggtttttcaccctctagtggccttggacattgagtatttgtagaaatgcagattacattgcaaatggaaacctttgccaggaagacacatgcattttgcttttaattctttgagacatttgattttgtcttagggactgacctttcagcatcaaagaaatacatatctactgtatccgccaaagtttgtgatgcctgcatagacgcttacttgtaaaaaaaaaaaaatacaaaaaaatacaaaaaaaccaacaacaaaaaccacaattgaattgcctttgaaagtgggagatgatctgtctccaacggattgaaaaaaaaaaatgcttcttaaaaaatgtgtatgttttgtattctttttttctagtagaaaataactgacttgaaatattggtggtttttttcttagtgacgtgtgttgcttttgtgtgtaataatatttgaatgtaattacagcagtgccaatttgccaaagatgttggacatatttttcttttttggggaggagggcagggctaggggtgggacttgggagaaaacaggggtggggttttggtttaattttttttttacttttttttccttgtcaaacctgaaatttgtggcttccttttaagttaaatggttgactgcaacacctttattttagattagttggagaaacatgcaataagattggcgtagtttcaatatctgtgtgtcttttcatgagtggctgttacttgtgaagaattgattttatgtaacctttatgtgagataattatttgtaaatatttgccataattttattggttcctaaaataaaagtaattttttaagttca

SEQ ID NO: 21 - DNA, 8342 bp, Homo sapiens
gaaactcatggaactgttcctccagattaacacttcaggggttatggaagctggaggaagctgagcttttactacatcttttgggggtttgggcaattatgaataaggctgctgtatacatccgtgtgcaggattttgtgtggacataagttttcaactcctttggttaaatcctaaggaatttcatatgcagaataaatggtaattaaaatgtgcaggatgacaagatggagcaaacagtgcttgtaccaccaggacctgacagcttcaacttcttcaccagagaatctcttgcggctattgaaagacgcattgcagaagaaaaggcaaagaatcccaaaccagacaaaaaagatgacgacgaaaatggcccaaagccaaatagtgacttggaagctggaaagaaccttccatttatttatggagacattcctccagagatggtgtcagagcccctggaggacctggacccctactatatcaataagaaaacttttatagtattgaataaagggaaggccatcttccggttcagtgccacctctgccctgtacattttaactcccttcaatcctcttaggaaaatagctattaagattttggtacattcattattcagcatgctaattatgtgcactattttgacaaactgtgtgtttatgacaatgagtaaccctcctgattggacaaagaatgtagaatacaccttcacaggaatatatacttttgaatcacttataaaaattattgcaaggggattctgtttagaagattttactttccttcgggatccatggaactggctcgatttcactgtcattacatttgcgtacgtcacagagtttgtggacctgggcaatgtctcggcattgagaacattcagagttctccgagcattgaagacgatttcagtcattccaggcctgaaaaccattgtgggagccctgatccagtctgtgaagaagctctcagatgtaatgatcctgactgtgttctgtctgagcgtatttgctctaattgggctgcagctgttcatgggcaacctgaggaataaatgtatacaatggcctcccaccaatgcttccttggaggaacatagtatagaaaagaatataactgtgaattataatggtacacttataaatgaaactgtctttgagtttgactggaagtcatatattcaagattcaagatatcattatttcctggagggttttttagatgcactactatgtggaaatagctctgatgcaggccaatgtccagagggatatatgtgtgtgaaagctggtagaaatcccaattatggctacacaagctttgataccttcagttgggcttttttgtccttgtttcgactaatgactcaggacttctgggaaaatctttatcaactgacattacgtgctgctgggaaaacgtacatgatattttttgtattggtcattttcttgggctcattctacctaataaatttgatcctggctgtggtggccatggcctacgaggaacagaatcaggccaccttggaagaagcagaacagaaagaggccgaatttcagcagatgattgaacagcttaaaaagcaacaggaggcagctcagcaggcagcaacggcaactgcctcagaacattccagagagcccagtgcagcaggcaggctctcagacagctcatctgaagcctctaagttgagttccaagagtgctaaggaaagaagaaatcggaggaagaaaagaaaacagaaagagcagtctggtggggaagagaaagatgaggatgaattccaaaaatctgaatctgaggacagcatcaggaggaaaggttttcgcttctccattgaagggaaccgattgacatatgaaaagaggtactcctccccacaccagtctttgttgagcatccgtggctccctattttcaccaaggcgaaatagcagaacaagccttttcagctttagagggcgagcaaaggatgtgggatctgagaacgacttcgcagatgatgagcacagcacctttgaggataacgagagccgtagagattccttgtttgtgccccgacgacacggagagagacgcaacagcaacctgagtcagaccagtaggtcatcccggatgctggcagtgtttccagcgaatgggaagatgcacagcactgtggattgcaatggtgtggtttccttggttggtggaccttcagttcctacatcgcctgttggacagcttctgccagaggtgataatagataagccagctactgatgacaatggaacaaccactgaaactgaaatgagaaagagaaggtcaagttctttccacgtttccatggactttctagaagatccttcccaaaggcaacgagcaatgagtatagccagcattctaacaaatacagtagaagaacttgaagaatccaggcagaaatgcccaccctgttggtataaattttccaacatattcttaatctgggactgttctccatattggttaaaagtgaaacatgttgtcaacctggttgtgatggacccatttgttgacctggccatcaccatctgtattgtcttaaatactcttttcatggccatggagcactatccaatgacggaccatttcaataatgtgcttacagtaggaaacttggttttcactgggatctttacagcagaaatgtttctgaaaattattgccatggatccttactattatttccaagaaggctggaatatctttgacggttttattgtgacgcttagcctggtagaacttggactcgccaatgtggaaggattatctgttctccgttcatttcgattgctgcgagttttcaagttggcaaaatcttggccaacgttaaatatgctaataaagatcatcggcaattccgtgggggctctgggaaatttaaccctcgtcttggccatcatcgtcttcatttttgccgtggtcggcatgcagctctttggtaaaagctacaaagattgtgtctgcaagatcgccagtgattgtcaactcccacgctggcacatgaatgacttcttccactccttcctgattgtgttccgcgtgctgtgtggggagtggatagagaccatgtgggactgtatggaggttgctggtcaagccatgtgccttactgtcttcatgatggtcatggtgattggaaacctagtggtcctgaatctctttctggccttgcttctgagctcatttagtgcagacaaccttgcagccactgatgatgataatgaaatgaataatctccaaattgctgtggataggatgcacaaaggagtagcttatgtgaaaagaaaaatatatgaatttattcaacagtccttcattaggaaacaaaagattttagatgaaattaaaccacttgatgatctaaacaacaagaaagacagttgtatgtccaatcatacagcagaaattgggaaagatcttgactatcttaaagatgtaaatggaactacaagtggtataggaactggcagcagtgttgaaaaatacattattgatgaaagtgattacatgtcattcataaacaaccccagtcttactgtgactgtaccaattgctgtaggagaatctgactttgaaaatttaaacacggaagactttagtagtgaatcggatctggaagaaagcaaagagaaactgaatgaaagcagtagctcatcagaaggtagcactgtggacatcggcgcacctgtagaagaacagcccgtagtggaacctgaagaaactcttgaaccagaagcttgtttcactgaaggctgtgtacaaagattcaagtgttgtcaaatcaatgtggaagaaggcagaggaaaacaatggtggaacctgagaaggacgtgtttccgaatagttgaacataactggtttgagaccttcattgttttcatgattctccttagtagtggtgctctggcatttgaagatatatatattgatcagcgaaagacgattaagacgatgttggaatatgctgacaaggttttcacttacattttcattctggaaatgcttctaaaatgggtggcatatggctatcaaacatatttcaccaatgcctggtgttggctggacttcttaattgttgatgtttcattggtcagtttaacagcaaatgccttgggttactcagaacttggagccatcaaatctctcaggacactaagagctctgagacctctaagagccttatctcgatttgaagggatgagggtggttgtgaatgcccttttaggagcaattccatccatcatgaatgtgcttctggtttgtcttatattctggctaattttcagcatcatgggcgtaaatttgtttgctggcaaattctaccactgtattaacaccacaactggtgacaggtttgacatcgaagacgtgaataatcatactgattgcctaaaactaatagaaagaaatgagactgctcgatggaaaaatgtgaaagtaaactttgataatgtaggatttgggtatctctctttgcttcaagttgccacattcaaaggatggatggatataatgtatgcagcagttgattccagaaatgtggaactccagcctaagtatgaagaaagtctgtacatgtatctttactttgttattttcatcatctttgggtccttcttcaccttgaacctgtttattggtgtcatcatagataatttcaaccagcagaaaaagaagtttggaggtcaagacatctttatgacagaagaacagaagaaatactataatgcaatgaaaaaattaggatcgaaaaaaccgcaaaagcctatacctcgaccaggaaacaaatttcaaggaatggtctttgacttcgtaaccagacaagtttttgacataagcatcatgattctcatctgtcttaacatggtcacaatgatggtggaaacagatgaccagagtgaatatgtgactaccattttgtcacgcatcaatctggtgttcattgtgctatttactggagagtgtgtactgaaactcatctctctacgccattattattttaccattggatggaatatttttgattttgtggttgtcattctctccattgtaggtatgtttcttgccgagctgatagaaaagtatttcgtgtcccctaccctgttccgagtgatccgtcttgctaggattggccgaatcctacgtctgatcaaaggagcaaaggggatccgcacgctgctctttgctttgatgatgtcccttcctgcgttgtttaacatcggcctcctactcttcctagtcatgttcatctacgccatctttgggatgtccaactttgcctatgttaagagggaagttgggatcgatgacatgttcaactttgagacctttggcaacagcatgatctgcctattccaaattacaacctctgctggctgggatggattgctagcacccattctcaacagtaagccacccgactgtgaccctaataaagttaaccctggaagctcagttaagggagactgtgggaacccatctgttggaattttcttttttgtcagttacatcatcatatccttcctggttgtggtgaacatgtacatcgcggtcatcctggagaacttcagtgttgctactgaagaaagtgcagagcctctgagtgaggatgactttgagatgttctatgaggtttgggagaagtttgatcccgatgcaactcagttcatggaatttgaaaaattatctcagtttgcagctgcgcttgaaccgcctctcaatctgccacaaccaaacaaactccagctcattgccatggatttgcccatggtgagtggtgaccggatccactgtcttgatatcttatttgcttttacaaagcgggttctaggagagagtggagagatggatgctctacgaatacagatggaagagcgattcatggcttccaatccttccaaggtctcctatcagccaatcactactactttaaaacgaaaacaagaggaagtatctgctgtcattattcagcgtgcttacagacgccaccttttaaagcgaactgtaaaacaagcttcctttacgtacaataaaaacaaaatcaaaggtggggctaatcttcttataaaagaagacatgataattgacagaataaatgaaaactctattacagaaaaaactgatctgaccatgtccactgcagcttgtccaccttcctatgaccgggtgacaaagccaattgtggaaaaacatgagcaagaaggcaaagatgaaaaagccaaagggaaataaatgaaaataaataaaaataattgggtgacaaattgtttacagcctgtgaaggtgatgtatttttatcaacaggactcctttaggaggtcaatgccaaactgactgtttttacacaaatctccttaaggtcagtgcctacaataagacagtgaccccttgtcagcaaactgtgactctgtgtaaaggggagatgaccttgacaggaggttactgttctcactaccagctgacactgctgaagataagatgcacaatggctagtcagactgtagggaccagtttcaaggggtgcaaacctgtgattttggggttgtttaacatgaaacactttagtgtagtaattgtatccactgtttgcatttcaactgccacatttgtcacatttttatggaatctgttagtggattcatctttttgttaatccatgtgtttattatatgtgactatttttgtaaacgaagtttctgttgagaaataggctaaggacctctataacaggtatgccacctggggggtatggcaaccacatggccctcccagctacacaaagtcgtggtttgcatgagggcatgctgcacttagagatcatgcatgagaaaaagtcacaagaaaaacaaattcttaaatttcaccatatttctgggaggggtaattgggtgataagtggaggtgctttgttgatcttgttttgcgaaatccagcccctagaccaagtagattatttgtgggtaggccagtaaatcttagcaggtgcaaacttcattcaaatgtttggagtcataaatgttatgtttctttttgttgtattaaaaaaaaaacctgaatagtgaatattgcccctcaccctccaccgccagaagactgaattgaccaaaattactctttataaatttctgctttttcctgcactttgtttagccatcttcggctctcagcaaggttgacactgtatatgttaatgaaatgctatttattatgtaaatagtcattttaccctgtggtgcacgtttgagcaaacaaataatgacctaagcacagtatttattgcatcaaatatgtaccacaagaaatgtagagtgcaagctttacacaggtaataaaatgtattctgtaccatttatagatagtttggatgctatcaatgcatgtttatattaccatgctgctgtatctggtttctctcactgctcagaatctcatttatgagaaaccatatgtcagtggtaaagtcaaggaaattgttcaacagatctcatttatttaagtcattaagcaatagtttgcagcactttaacagctttttggttatttttacattttaagtggataacatatggtatatagccagactgtacagacatgtttaaaaaaacacactgcttaacctattaaatatgtgtttagaattttataagcaaatataaatactgtaaaaagtcactttattttatttttcagcattatgtacataaatatgaagaggaaattatcttcaggttgatatcacaatcacttttcttactttctgtccatagtactttttcatgaaagaaatttgctaaataagacatgaaaacaagactgggtagttgtagatttctgctttttaaattacatttgctaattttagattatttcacaattttaaggagcaaaataggttcacgattcatatccaaattatgctttgcaattggaaaagggtttaaaattttatttatatttctggtagtacctgcactaactgaattgaaggtagtgcttatgttatttttgttctttttttctgacttcggtttatgttttcatttctttggagtaatgctgctctagattgttctaaatagaatgtgggcttcataatttttttttccacaaaaacagagtagtcaacttatatagtcaattacatcaggacattttgtgtttcttacagaagcaaaccataggctcctcttttccttaaaactacttagataaactgtattcgtgaactgcatgctggaaaatgctactattatgctaaataatgctaaccaacatttaaaatgtgcaaaactaataaagattacattttttatttta

SEQ ID NO: 22 - DNA, 8100 bp, Homo sapiens
aatgtgcaggatgacaagatggagcaaacagtgcttgtaccaccaggacctgacagcttcaacttcttcaccagagaatctcttgcggctattgaaagacgcattgcagaagaaaaggcaaagaatcccaaaccagacaaaaaagatgacgacgaaaatggcccaaagccaaatagtgacttggaagctggaaagaaccttccatttatttatggagacattcctccagagatggtgtcagagcccctggaggacctggacccctactatatcaataagaaaacttttatagtattgaataaagggaaggccatcttccggttcagtgccacctctgccctgtacattttaactcccttcaatcctcttaggaaaatagctattaagattttggtacattcattattcagcatgctaattatgtgcactattttgacaaactgtgtgtttatgacaatgagtaaccctcctgattggacaaagaatgtagaatacaccttcacaggaatatatacttttgaatcacttataaaaattattgcaaggggattctgtttagaagattttactttccttcgggatccatggaactggctcgatttcactgtcattacatttgcgtacgtcacagagtttgtggacctgggcaatgtctcggcattgagaacattcagagttctccgagcattgaagacgatttcagtcattccaggcctgaaaaccattgtgggagccctgatccagtctgtgaagaagctctcagatgtaatgatcctgactgtgttctgtctgagcgtatttgctctaattgggctgcagctgttcatgggcaacctgaggaataaatgtatacaatggcctcccaccaatgcttccttggaggaacatagtatagaaaagaatataactgtgaattataatggtacacttataaatgaaactgtctttgagtttgactggaagtcatatattcaagattcaagatatcattatttcctggagggttttttagatgcactactatgtggaaatagctctgatgcaggccaatgtccagagggatatatgtgtgtgaaagctggtagaaatcccaattatggctacacaagctttgataccttcagttgggcttttttgtccttgtttcgactaatgactcaggacttctgggaaaatctttatcaactgacattacgtgctgctgggaaaacgtacatgatattttttgtattggtcattttcttgggctcattctacctaataaatttgatcctggctgtggtggccatggcctacgaggaacagaatcaggccaccttggaagaagcagaacagaaagaggccgaatttcagcagatgattgaacagcttaaaaagcaacaggaggcagctcagcaggcagcaacggcaactgcctcagaacattccagagagcccagtgcagcaggcaggctctcagacagctcatctgaagcctctaagttgagttccaagagtgctaaggaaagaagaaatcggaggaagaaaagaaaacagaaagagcagtctggtggggaagagaaagatgaggatgaattccaaaaatctgaatctgaggacagcatcaggaggaaaggttttcgcttctccattgaagggaaccgattgacatatgaaaagaggtactcctccccacaccagtctttgttgagcatccgtggctccctattttcaccaaggcgaaatagcagaacaagccttttcagctttagagggcgagcaaaggatgtgggatctgagaacgacttcgcagatgatgagcacagcacctttgaggataacgagagccgtagagattccttgtttgtgccccgacgacacggagagagacgcaacagcaacctgagtcagaccagtaggtcatcccggatgctggcagtgtttccagcgaatgggaagatgcacagcactgtggattgcaatggtgtggtttccttggttggtggaccttcagttcctacatcgcctgttggacagcttctgccagagggaacaaccactgaaactgaaatgagaaagagaaggtcaagttctttccacgtttccatggactttctagaagatccttcccaaaggcaacgagcaatgagtatagccagcattctaacaaatacagtagaagaacttgaagaatccaggcagaaatgcccaccctgttggtataaattttccaacatattcttaatctgggactgttctccatattggttaaaagtgaaacatgttgtcaacctggttgtgatggacccatttgttgacctggccatcaccatctgtattgtcttaaatactcttttcatggccatggagcactatccaatgacggaccatttcaataatgtgcttacagtaggaaacttggttttcactgggatctttacagcagaaatgtttctgaaaattattgccatggatccttactattatttccaagaaggctggaatatctttgacggttttattgtgacgcttagcctggtagaacttggactcgccaatgtggaaggattatctgttctccgttcatttcgattgctgcgagttttcaagttggcaaaatcttggccaacgttaaatatgctaataaagatcatcggcaattccgtgggggctctgggaaatttaaccctcgtcttggccatcatcgtcttcatttttgccgtggtcggcatgcagctctttggtaaaagctacaaagattgtgtctgcaagatcgccagtgattgtcaactcccacgctggcacatgaatgacttcttccactccttcctgattgtgttccgcgtgctgtgtggggagtggatagagaccatgtgggactgtatggaggttgctggtcaagccatgtgccttactgtcttcatgatggtcatggtgattggaaacctagtggtcctgaatctctttctggccttgcttctgagctcatttagtgcagacaaccttgcagccactgatgatgataatgaaatgaataatctccaaattgctgtggataggatgcacaaaggagtagcttatgtgaaaagaaaaatatatgaatttattcaacagtccttcattaggaaacaaaagattttagatgaaattaaaccacttgatgatctaaacaacaagaaagacagttgtatgtccaatcatacagcagaaattgggaaagatcttgactatcttaaagatgtaaatggaactacaagtggtataggaactggcagcagtgttgaaaaatacattattgatgaaagtgattacatgtcattcataaacaaccccagtcttactgtgactgtaccaattgctgtaggagaatctgactttgaaaatttaaacacggaagactttagtagtgaatcggatctggaagaaagcaaagagaaactgaatgaaagcagtagctcatcagaaggtagcactgtggacatcggcgcacctgtagaagaacagcccgtagtggaacctgaagaaactcttgaaccagaagcttgtttcactgaaggctgtgtacaaagattcaagtgttgtcaaatcaatgtggaagaaggcagaggaaaacaatggtggaacctgagaaggacgtgtttccgaatagttgaacataactggtttgagaccttcattgttttcatgattctccttagtagtggtgctctggcatttgaagatatatatattgatcagcgaaagacgattaagacgatgttggaatatgctgacaaggttttcacttacattttcattctggaaatgcttctaaaatgggtggcatatggctatcaaacatatttcaccaatgcctggtgttggctggacttcttaattgttgatgtttcattggtcagtttaacagcaaatgccttgggttactcagaacttggagccatcaaatctctcaggacactaagagctctgagacctctaagagccttatctcgatttgaagggatgagggtggttgtgaatgcccttttaggagcaattccatccatcatgaatgtgcttctggtttgtcttatattctggctaattttcagcatcatgggcgtaaatttgtttgctggcaaattctaccactgtattaacaccacaactggtgacaggtttgacatcgaagacgtgaataatcatactgattgcctaaaactaatagaaagaaatgagactgctcgatggaaaaatgtgaaagtaaactttgataatgtaggatttgggtatctctctttgcttcaagttgccacattcaaaggatggatggatataatgtatgcagcagttgattccagaaatgtggaactccagcctaagtatgaagaaagtctgtacatgtatctttactttgttattttcatcatctttgggtccttcttcaccttgaacctgtttattggtgtcatcatagataatttcaaccagcagaaaaagaagtttggaggtcaagacatctttatgacagaagaacagaagaaatactataatgcaatgaaaaaattaggatcgaaaaaaccgcaaaagcctatacctcgaccaggaaacaaatttcaaggaatggtctttgacttcgtaaccagacaagtttttgacataagcatcatgattctcatctgtcttaacatggtcacaatgatggtggaaacagatgaccagagtgaatatgtgactaccattttgtcacgcatcaatctggtgttcattgtgctatttactggagagtgtgtactgaaactcatctctctacgccattattattttaccattggatggaatatttttgattttgtggttgtcattctctccattgtaggtatgtttcttgccgagctgatagaaaagtatttcgtgtcccctaccctgttccgagtgatccgtcttgctaggattggccgaatcctacgtctgatcaaaggagcaaaggggatccgcacgctgctctttgctttgatgatgtcccttcctgcgttgtttaacatcggcctcctactcttcctagtcatgttcatctacgccatctttgggatgtccaactttgcctatgttaagagggaagttgggatcgatgacatgttcaactttgagacctttggcaacagcatgatctgcctattccaaattacaacctctgctggctgggatggattgctagcacccattctcaacagtaagccacccgactgtgaccctaataaagttaaccctggaagctcagttaagggagactgtgggaacccatctgttggaattttcttttttgtcagttacatcatcatatccttcctggttgtggtgaacatgtacatcgcggtcatcctggagaacttcagtgttgctactgaagaaagtgcagagcctctgagtgaggatgactttgagatgttctatgaggtttgggagaagtttgatcccgatgcaactcagttcatggaatttgaaaaattatctcagtttgcagctgcgcttgaaccgcctctcaatctgccacaaccaaacaaactccagctcattgccatggatttgcccatggtgagtggtgaccggatccactgtcttgatatcttatttgcttttacaaagcgggttctaggagagagtggagagatggatgctctacgaatacagatggaagagcgattcatggcttccaatccttccaaggtctcctatcagccaatcactactactttaaaacgaaaacaagaggaagtatctgctgtcattattcagcgtgcttacagacgccaccttttaaagcgaactgtaaaacaagcttcctttacgtacaataaaaacaaaatcaaaggtggggctaatcttcttataaaagaagacatgataattgacagaataaatgaaaactctattacagaaaaaactgatctgaccatgtccactgcagcttgtccaccttcctatgaccgggtgacaaagccaattgtggaaaaacatgagcaagaaggcaaagatgaaaaagccaaagggaaataaatgaaaataaataaaaataattgggtgacaaattgtttacagcctgtgaaggtgatgtatttttatcaacaggactcctttaggaggtcaatgccaaactgactgtttttacacaaatctccttaaggtcagtgcctacaataagacagtgaccccttgtcagcaaactgtgactctgtgtaaaggggagatgaccttgacaggaggttactgttctcactaccagctgacactgctgaagataagatgcacaatggctagtcagactgtagggaccagtttcaaggggtgcaaacctgtgattttggggttgtttaacatgaaacactttagtgtagtaattgtatccactgtttgcatttcaactgccacatttgtcacatttttatggaatctgttagtggattcatctttttgttaatccatgtgtttattatatgtgactatttttgtaaacgaagtttctgttgagaaataggctaaggacctctataacaggtatgccacctggggggtatggcaaccacatggccctcccagctacacaaagtcgtggtttgcatgagggcatgctgcacttagagatcatgcatgagaaaaagtcacaagaaaaacaaattcttaaatttcaccatatttctgggaggggtaattgggtgataagtggaggtgctttgttgatcttgttttgcgaaatccagcccctagaccaagtagattatttgtgggtaggccagtaaatcttagcaggtgcaaacttcattcaaatgtttggagtcataaatgttatgtttctttttgttgtattaaaaaaaaaacctgaatagtgaatattgcccctcaccctccaccgccagaagactgaattgaccaaaattactctttataaatttctgctttttcctgcactttgtttagccatcttcggctctcagcaaggttgacactgtatatgttaatgaaatgctatttattatgtaaatagtcattttaccctgtggtgcacgtttgagcaaacaaataatgacctaagcacagtatttattgcatcaaatatgtaccacaagaaatgtagagtgcaagctttacacaggtaataaaatgtattctgtaccatttatagatagtttggatgctatcaatgcatgtttatattaccatgctgctgtatctggtttctctcactgctcagaatctcatttatgagaaaccatatgtcagtggtaaagtcaaggaaattgttcaacagatctcatttatttaagtcattaagcaatagtttgcagcactttaacagctttttggttatttttacattttaagtggataacatatggtatatagccagactgtacagacatgtttaaaaaaacacactgcttaacctattaaatatgtgtttagaattttataagcaaatataaatactgtaaaaagtcactttattttatttttcagcattatgtacataaatatgaagaggaaattatcttcaggttgatatcacaatcacttttcttactttctgtccatagtactttttcatgaaagaaatttgctaaataagacatgaaaacaagactgggtagttgtagatttctgctttttaaattacatttgctaattttagattatttcacaattttaaggagcaaaataggttcacgattcatatccaaattatgctttgcaattggaaaagggtttaaaattttatttatatttctggtagtacctgcactaactgaattgaaggtagtgcttatgttatttttgttctttttttctgacttcggtttatgttttcatttctttggagtaatgctgctctagattgttctaaatagaatgtgggcttcataatttttttttccacaaaaacagagtagtcaacttatatagtcaattacatcaggacattttgtgtttcttacagaagcaaaccataggctcctcttttccttaaaactacttagataaactgtattcgtgaactgcatgctggaaaatgctactattatgctaaataatgctaaccaacatttaaaatgtgcaaaactaataaagattacattttttatttta

SEQ ID NO: 23 - DNA, 2214 bp, Homo sapiens
gtcacatggggtgcgcgcccagactccgacccggaggcggaaccggcagtgcagcccgaagccccgcagtccccgagcacgcgtggccatgcgtcccctgcgcccccgcgccgcgctgctggcgctcctggcctcgctcctggccgcgcccccggtggccccggccgaggccccgcacctggtgcatgtggacgcggcccgcgcgctgtggcccctgcggcgcttctggaggagcacaggcttctgccccccgctgccacacagccaggctgaccagtacgtcctcagctgggaccagcagctcaacctcgcctatgtgggcgccgtccctcaccgcggcatcaagcaggtccggacccactggctgctggagcttgtcaccaccagggggtccactggacggggcctgagctacaacttcacccacctggacgggtacctggaccttctcagggagaaccagctcctcccagggtttgagctgatgggcagcgcctcgggccacttcactgactttgaggacaagcagcaggtgtttgagtggaaggacttggtctccagcctggccaggagatacatcggtaggtacggactggcgcatgtttccaagtggaacttcgagacgtggaatgagccagaccaccacgactttgacaacgtctccatgaccatgcaaggcttcctgaactactacgatgcctgctcggagggtctgcgcgccgccagccccgccctgcggctgggaggccccggcgactccttccacaccccaccgcgatccccgctgagctggggcctcctgcgccactgccacgacggtaccaacttcttcactggggaggcgggcgtgcggctggactacatctccctccacaggaagggtgcgcgcagctccatctccatcctggagcaggagaaggtcgtcgcgcagcagatccggcagctcttccccaagttcgcggacacccccatttacaacgacgaggcggacccgctggtgggctggtccctgccacagccgtggagggcggacgtgacctacgcggccatggtggtgaaggtcatcgcgcagcatcagaacctgctactggccaacaccacctccgccttcccctacgcgctcctgagcaacgacaatgccttcctgagctaccacccgcaccccttcgcgcagcgcacgctcaccgcgcgcttccaggtcaacaacacccgcccgccgcacgtgcagctgttgcgcaagccggtgctcacggccatggggctgctggcgctgctggatgaggagcagctctgggccgaagtgtcgcaggccgggaccgtcctggacagcaaccacacggtgggcgtcctggccagcgcccaccgcccccagggcccggccgacgcctggcgcgccgcggtgctgatctacgcgagcgacgacacccgcgcccaccccaaccgcagcgtcgcggtgaccctgcggctgcgcggggtgccccccggcccgggcctggtctacgtcacgcgctacctggacaacgggctctgcagccccgacggcgagtggcggcgcctgggccggcccgtcttccccacggcagagcagttccggcgcatgcgcgcggctgaggacccggtggccgcggcgccccgccccttacccgccggcggccgcctgaccctgcgccccgcgctgcggctgccgtcgcttttgctggtgcacgtgtgtgcgcgccccgagaagccgcccgggcaggtcacgcggctccgcgccctgcccctgacccaagggcagctggttctggtctggtcggatgaacacgtgggctccaagtgcctgtggacatacgagatccagttctctcaggacggtaaggcgtacaccccggtcagcaggaagccatcgaccttcaacctctttgtgttcagcccagacacaggtgctgtctctggctcctaccgagttcgagccctggactactgggcccgaccaggccccttctcggaccctgtgccgtacctggaggtccctgtgccaagagggcccccatccccgggcaatccatgagcctgtgctgagccccagtgggttgcacctccaccggcagtcagcgagctggggctgcactgtgcccatgctgccctcccatcaccccctttgcaatatatttttatattttattattttcttttatatcttggtaccaacgccccctttaaagcggctttgca

SEQ ID NO: 24 - DNA, 3046 bp, Homo sapiens
agaaagagagcaaagagaaaagagagagagaggtgctctggctccggggctcttctcccaaacgggtcgaggtcccagctgaggctctcccaggacaagtccctcagccccagtgaacgtcaccgtcaggcacctcaaggccaactctgcagtggtgagctgggatgttctggaggatgaggttgtcatcggatttgccatctcccagcagaagaaggatgtgcggatgctgcgcttcatccaggaggtgaacaccaccacccgctcatgtgccctctgggacctggaggaggatacggagtacatagtccacgtgcaggccatctccattcagggccagagcccagccagcgagcctgtgctcttcaagaccccgcgtgaggctgagaagatggcctccaagaacaaagatgaggtaaccatgaaagagatggggaggaaccaacagctgcggacaggcgaggtgctgatcatcgtcgtggtcctgttcatgtgggcaggtgtcattgccctcttctgccgccagtatgacatcatcaaggacaatgaacccaataacaacaaggaaaaaaccaagagtgcatcagaaaccagcacaccagagcaccagggcggggggcttctccgcagcaaggtgagggcaagacctgggcctgggtgggccaccctgtgcctcatgctctggtaatccctggactgcagagggggtcagctcggggactggcatggcgacagctgggcagagccagacttggctgctgcctgtgtgacacagggacactgcaagttgattttggatcctctccttttgcagggtgccaggggccagtggtgatttgaagaaaaaaaaaaaaaagcagtgagtggggagggcagaattcttggttggcgcgggacaataggagtggggtgtctggcccattcctgctcctgctgtgccttgtgaccttgggcaggtgctttaccgctgtaccttcatttcctcttctgtaaaacagatatgaaaaccttttcagtgcttgccctcagcagctaagaagacagacagtagagaatgtgagaggatctcatggttctgatgatgattatccaacaaacatctggccctctctacatctcttccctccatctccttgtaccctctggcttactgtcctctctctggcgcactttcctgaagcctcttattaactcccatctccagaagcacctcaacaatgtcagtggctgaggctgcactcagagggatgactgctgggggtagactgggtgccaggggccatgggcccaggacccagtcttggccattcagttgagtgaggctgaaggctgggtttgaaaaggcaaaaagacaagacatccaggcagggcttctcttttctttccacaagggacaagagcttggcttatttaggctacagccctgctgctgctcccttccttcttctgtcctgtttccagccttgcaagaaggctattcacaattaggcctggctgcttctctcatttttttcctcccagtttccaaacaagccctcagtgaacatcattgaagcgtgactgcctgtctgcagggagaaggattccatttttcttctcagctggtccccaggcccacgggcacagggagagggacaactgcagcagtggggaggaggcacagctagctgcacagttctctcttctccttgtcctagtcagatgaaggaggctgcactacaaacccaaattctgcaaaaaaataaaaataagccacaaaactaaaaggcctggccccattctggaaaaggcaaagctgcatgagacacagccttctgcctcctcgcctctcctggactggcttcctctttgagaaaatgcacaaagccctgggagatgacaagcacaaggactgactcaagctgtgtctttcagaccaaggaacatcagagaagctgtggggctgcctgccaggcaggatcatggctgccatcaagccttttctggatccagccatcaaggacatgtttgtggtgtgatgcacacttttgcaagcgtgtaagatgttacctggtttgtctcttttggaaaacaaaaatcagaaggctgcattctagagggcagagaaattcccccgaagactgagctggttgcctgcatcctctatcttctttgacccttatgactgaaagatcatcagtttggaaggtactggtccaatttatttaggaagtatctcttggagtttcagaaatgctagcttggacaactgaaaagtcacatcacagctggcattctgggggctaccaaaacaccccttctggagtagaagctgctggaaggcaggcctgagccattcaccacggacaggaagagcagctctggctatcaccactggcctctggggtcttcatatcttgccatctcatccagggttccatgaaagttacccagggtcctcatgtccttccttagagcctgagtggtgtgaggtgacaggtctctctctccactgcccctttctggtttaaaaaaatggtgcttgatgagggaaggtagactcttccctaggactgacgagttacggctgccagatgcctgcatgggaagaggtggacatctgcatcttccattggtggtcaaggatgggtgtgggagaaccacacctagtgcaagcctggtactcagtaaatatttgttgaaatgaatgataagagcattggtccccaagccagagagccagaagccatcacccaatgaccgccccttccttccggtctacaagagctctcaaggctgggtctgccaccactctgctttgcccaagtgtgacagcactggggaggagagacaggataaagggcagatgtcagcaatactaagggcttcctcatgggagggcatgaggctccactcattgtcttgtgacttccatccctgctgaatggggctgcaaggccaaggctccttaggggagaggtccttacctctgatccacttagagcaataaccactttttaaatgtaaaataaaaagacaaatgaaaaggcaaaaaaaaaaaaaaaaa

SEQ ID NO: 25 - DNA, 2748 bp, Homo sapiens
gcggccgccgggcgccggagccgcgtccccctgcgccgccccgggcctgccggccggaggagccaccatacaccccgggtcgccgagcgcctggccgccccgcgcccgcgccgcgctccgcctgtggctgggctgcgtctgcttcgcgctggtgcaggcggacagtccctcagccccagtgaacgtcaccgtcaggcacctcaaggccaactctgcagtggtgagctgggatgttctggaggatgaggttgtcatcggatttgccatctcccagcagaagaaggatgtgcggatgctgcgcttcatccaggaggtgaacaccaccacccgctcatgtgccctctgggacctggaggaggatacggagtacatagtccacgtgcaggccatctccattcagggccagagcccagccagcgagcctgtgctcttcaagaccccgcgtgaggctgagaagatggcctccaagaacaaagatgaggtaaccatgaaagagatggggaggaaccaacagctgcggacaggcgaggtgctgatcatcgtcgtggtcctgttcatgtgggcaggtgtcattgccctcttctgccgccagtatgacatcatcaaggacaatgaacccaataacaacaaggaaaaaaccaagagtgcatcagaaaccagcacaccagagcaccagggcggggggcttctccgcagcaagatatgaaaaccttttcagtgcttgccctcagcagctaagaagacagacagtagagaatgtgagaggatctcatggttctgatgatgattatccaacaaacatctggccctctctacatctcttccctccatctccttgtaccctctggcttactgtcctctctctggcgcactttcctgaagcctcttattaactcccatctccagaagcacctcaacaatgtcagtggctgaggctgcactcagagggatgactgctgggggtagactgggtgccaggggccatgggcccaggacccagtcttggccattcagttgagtgaggctgaaggctgggtttgaaaaggcaaaaagacaagacatccaggcagggcttctcttttctttccacaagggacaagagcttggcttatttaggctacagccctgctgctgctcccttccttcttctgtcctgtttccagccttgcaagaaggctattcacaattaggcctggctgcttctctcatttttttcctcccagtttccaaacaagccctcagtgaacatcattgaagcgtgactgcctgtctgcagggagaaggattccatttttcttctcagctggtccccaggcccacgggcacagggagagggacaactgcagcagtggggaggaggcacagctagctgcacagttctctcttctccttgtcctagtcagatgaaggaggctgcactacaaacccaaattctgcaaaaaaataaaaataagccacaaaactaaaaggcctggccccattctggaaaaggcaaagctgcatgagacacagccttctgcctcctcgcctctcctggactggcttcctctttgagaaaatgcacaaagccctgggagatgacaagcacaaggactgactcaagctgtgtctttcagaccaaggaacatcagagaagctgtggggctgcctgccaggcaggatcatggctgccatcaagccttttctggatccagccatcaaggacatgtttgtggtgtgatgcacacttttgcaagcgtgtaagatgttacctggtttgtctcttttggaaaacaaaaatcagaaggctgcattctagagggcagagaaattcccccgaagactgagctggttgcctgcatcctctatcttctttgacccttatgactgaaagatcatcagtttggaaggtactggtccaatttatttaggaagtatctcttggagtttcagaaatgctagcttggacaactgaaaagtcacatcacagctggcattctgggggctaccaaaacaccccttctggagtagaagctgctggaaggcaggcctgagccattcaccacggacaggaagagcagctctggctatcaccactggcctctggggtcttcatatcttgccatctcatccagggttccatgaaagttacccagggtcctcatgtccttccttagagcctgagtggtgtgaggtgacaggtctctctctccactgcccctttctggtttaaaaaaatggtgcttgatgagggaaggtagactcttccctaggactgacgagttacggctgccagatgcctgcatgggaagaggtggacatctgcatcttccattggtggtcaaggatgggtgtgggagaaccacacctagtgcaagcctggtactcagtaaatatttgttgaaatgaatgataagagcattggtccccaagccagagagccagaagccatcacccaatgaccgccccttccttccggtctacaagagctctcaaggctgggtctgccaccactctgctttgcccaagtgtgacagcactggggaggagagacaggataaagggcagatgtcagcaatactaagggcttcctcatgggagggcatgaggctccactcattgtcttgtgacttccatccctgctgaatggggctgcaaggccaaggctccttaggggagaggtccttacctctgatccacttagagcaataaccactttttaaatgtaaaataaaaagacaaatgaaaaggcaaaaaaaaaaaaaaaaa

SEQ ID NO: 26 - DNA, 2428 bp, Homo sapiens
cccgcccacttccaactaccgcctccggcctgcccagggagagagagggagtggagcccagggagagggagcgcgagagagggagggaggaggggacggtgctttggctgacttttttttaaaagagggtgggggtggggggtgattgctggtcgtttgttgtggctgttaaattttaaactgccatgcactcggcttccagtatgctgggagcggtgaagatggaagggcacgagccgtccgactggagcagctactatgcagagcccgagggctactcctccgtgagcaacatgaacgccggcctggggatgaacggcatgaacacgtacatgagcatgtcggcggccgccatgggcagcggctcgggcaacatgagcgcgggctccatgaacatgtcgtcgtacgtgggcgctggcatgagcccgtccctggcggggatgtcccccggcgcgggcgccatggcgggcatgggcggctcggccggggcggccggcgtggcgggcatggggccgcacttgagtcccagcctgagcccgctcggggggcaggcggccggggccatgggcggcctggccccctacgccaacatgaactccatgagccccatgtacgggcaggcgggcctgagccgcgcccgcgaccccaagacctacaggcgcagctacacgcacgcaaagccgccctactcgtacatctcgctcatcaccatggccatccagcagagccccaacaagatgctgacgctgagcgagatctaccagtggatcatggacctcttccccttctaccggcagaaccagcagcgctggcagaactccatccgccactcgctctccttcaacgactgtttcctgaaggtgccccgctcgcccgacaagcccggcaagggctccttctggaccctgcaccctgactcgggcaacatgttcgagaacggctgctacctgcgccgccagaagcgcttcaagtgcgagaagcagctggcgctgaaggaggccgcaggcgccgccggcagcggcaagaaggcggccgccggagcccaggcctcacaggctcaactcggggaggccgccgggccggcctccgagactccggcgggcaccgagtcgcctcactcgagcgcctccccgtgccaggagcacaagcgagggggcctgggagagctgaaggggacgccggctgcggcgctgagccccccagagccggcgccctctcccgggcagcagcagcaggccgcggcccacctgctgggcccgccccaccacccgggcctgccgcctgaggcccacctgaagccggaacaccactacgccttcaaccacccgttctccatcaacaacctcatgtcctcggagcagcagcaccaccacagccaccaccaccaccaaccccacaaaatggacctcaaggcctacgaacaggtgatgcactaccccggctacggttcccccatgcctggcagcttggccatgggcccggtcacgaacaaaacgggcctggacgcctcgcccctggccgcagatacctcctactaccagggggtgtactcccggcccattatgaactcctcttaagaagacgacggcttcaggcccggctaactctggcaccccggatcgaggacaagtgagagagcaagtgggggtcgagactttggggagacggtgttgcagagacgcaagggagaagaaatccataacacccccaccccaacacccccaagacagcagtcttcttcacccgctgcagccgttccgtcccaaacagagggccacacagataccccacgttctatataaggaggaaaacgggaaagaatataaagttaaaaaaaagcctccggtttccactactgtgtagactcctgcttcttcaagcacctgcagattctgatttttttgttgttgttgttctcctccattgctgttgttgcagggaagtcttacttaaaaaaaaaaaaaaattttgtgagtgactcggtgtaaaaccatgtagttttaacagaaccagagggttgtactattgtttaaaaacaggaaaaaaaataatgtaagggtctgttgtaaatgaccaagaaaaagaaaaaaaaagcattcccaatcttgacacggtgaaatccaggtctcgggtccgattaatttatggtttctgcgtgctttatttatggcttataaatgtgtattctggctgcaagggccagagttccacaaatctatattaaagtgttatacccggttttatcccttgaatcttttcttccagatttttcttttctttacttggcttacaaaatatacaggcttggaaattatttcaagaaggagggagggataccctgtctggttgcaggttgtattttattttggcccagggagtgttgctgttttcccaacattttattaataaaattttcagacataaaaaa

SEQ ID NO: 27 - DNA, 2415 bp, Homo sapiens
cggccgctgctagaggggctgcttgcgccaggcgccggccgccccactgcgggtccctggcggccggtgtctgaggagtcggagagccgaggcggccagaccgtgcgccccgcgcttctcccgaggccgttccgggtctgaactgtaacagggaggggcctcgcaggagcagcagcgggcgagttaaagtatgctgggagcggtgaagatggaagggcacgagccgtccgactggagcagctactatgcagagcccgagggctactcctccgtgagcaacatgaacgccggcctggggatgaacggcatgaacacgtacatgagcatgtcggcggccgccatgggcagcggctcgggcaacatgagcgcgggctccatgaacatgtcgtcgtacgtgggcgctggcatgagcccgtccctggcggggatgtcccccggcgcgggcgccatggcgggcatgggcggctcggccggggcggccggcgtggcgggcatggggccgcacttgagtcccagcctgagcccgctcggggggcaggcggccggggccatgggcggcctggccccctacgccaacatgaactccatgagccccatgtacgggcaggcgggcctgagccgcgcccgcgaccccaagacctacaggcgcagctacacgcacgcaaagccgccctactcgtacatctcgctcatcaccatggccatccagcagagccccaacaagatgctgacgctgagcgagatctaccagtggatcatggacctcttccccttctaccggcagaaccagcagcgctggcagaactccatccgccactcgctctccttcaacgactgtttcctgaaggtgccccgctcgcccgacaagcccggcaagggctccttctggaccctgcaccctgactcgggcaacatgttcgagaacggctgctacctgcgccgccagaagcgcttcaagtgcgagaagcagctggcgctgaaggaggccgcaggcgccgccggcagcggcaagaaggcggccgccggagcccaggcctcacaggctcaactcggggaggccgccgggccggcctccgagactccggcgggcaccgagtcgcctcactcgagcgcctccccgtgccaggagcacaagcgagggggcctgggagagctgaaggggacgccggctgcggcgctgagccccccagagccggcgccctctcccgggcagcagcagcaggccgcggcccacctgctgggcccgccccaccacccgggcctgccgcctgaggcccacctgaagccggaacaccactacgccttcaaccacccgttctccatcaacaacctcatgtcctcggagcagcagcaccaccacagccaccaccaccaccaaccccacaaaatggacctcaaggcctacgaacaggtgatgcactaccccggctacggttcccccatgcctggcagcttggccatgggcccggtcacgaacaaaacgggcctggacgcctcgcccctggccgcagatacctcctactaccagggggtgtactcccggcccattatgaactcctcttaagaagacgacggcttcaggcccggctaactctggcaccccggatcgaggacaagtgagagagcaagtgggggtcgagactttggggagacggtgttgcagagacgcaagggagaagaaatccataacacccccaccccaacacccccaagacagcagtcttcttcacccgctgcagccgttccgtcccaaacagagggccacacagataccccacgttctatataaggaggaaaacgggaaagaatataaagttaaaaaaaagcctccggtttccactactgtgtagactcctgcttcttcaagcacctgcagattctgatttttttgttgttgttgttctcctccattgctgttgttgcagggaagtcttacttaaaaaaaaaaaaaaattttgtgagtgactcggtgtaaaaccatgtagttttaacagaaccagagggttgtactattgtttaaaaacaggaaaaaaaataatgtaagggtctgttgtaaatgaccaagaaaaagaaaaaaaaagcattcccaatcttgacacggtgaaatccaggtctcgggtccgattaatttatggtttctgcgtgctttatttatggcttataaatgtgtattctggctgcaagggccagagttccacaaatctatattaaagtgttatacccggttttatcccttgaatcttttcttccagatttttcttttctttacttggcttacaaaatatacaggcttggaaattatttcaagaaggagggagggataccctgtctggttgcaggttgtattttattttggcccagggagtgttgctgttttcccaacattttattaataaaattttcagacataaaaaa

SEQ ID NO: 28 - DNA, 2397 bp, Homo sapiens
gcacacactcatcgaaaaaaatttggattattagaagagagaggtctgcggcttccacaccgtacagcgtggtttttcttctcggtataaaagcaaagttgtttttgatacgtgacagtttcccacaagccaggctgatccttttctgtcagtccacttcaccaagcctgcccttggacaaggacccgatgcccaaccccaggcctggcaagccctcggccccttccttggcccttggcccatccccaggagcctcgcccagctggagggctgcacccaaagcctcagacctgctgggggcccggggcccagggggaaccttccagggccgagatcttcgaggcggggcccatgcctcctcttcttccttgaaccccatgccaccatcgcagctgcagctgcccacactgcccctagtcatggtggcaccctccggggcacggctgggccccttgccccacttacaggcactcctccaggacaggccacatttcatgcaccagctctcaacggtggatgcccacgcccggacccctgtgctgcaggtgcaccccctggagagcccagccatgatcagcctcacaccacccaccaccgccactggggtcttctccctcaaggcccggcctggcctcccacctgggatcaacgtggccagcctggaatgggtgtccagggagccggcactgctctgcaccttcccaaatcccagtgcacccaggaaggacagcaccctttcggctgtgccccagagctcctacccactgctggcaaatggtgtctgcaagtggcccggatgtgagaaggtcttcgaagagccagaggacttcctcaagcactgccaggcggaccatcttctggatgagaagggcagggcacaatgtctcctccagagagagatggtacagtctctggagcagcagctggtgctggagaaggagaagctgagtgccatgcaggcccacctggctgggaaaatggcactgaccaaggcttcatctgtggcatcatccgacaagggctcctgctgcatcgtagctgctggcagccaaggccctgtcgtcccagcctggtctggcccccgggaggcccctgacagcctgtttgctgtccggaggcacctgtggggtagccatggaaacagcacattcccagagttcctccacaacatggactacttcaagttccacaacatgcgaccccctttcacctacgccacgctcatccgctgggccatcctggaggctccagagaagcagcggacactcaatgagatctaccactggttcacacgcatgtttgccttcttcagaaaccatcctgccacctggaagaacgccatccgccacaacctgagtctgcacaagtgctttgtgcgggtggagagcgagaagggggctgtgtggaccgtggatgagctggagttccgcaagaaacggagccagaggcccagcaggtgttccaaccctacacctggcccctgacctcaagatcaaggaaaggaggatggacgaacaggggccaaactggtgggaggcagaggtggtgggggcagggatgataggccctggatgtgcccacagggaccaagaagtgaggtttccactgtcttgcctgccagggcccctgttcccccgctggcagccaccccctcccccatcatatcctttgccccaaggctgctcagaggggccccggtcctggccccagcccccacctccgccccagacacaccccccagtcgagccctgcagccaaacagagccttcacaaccagccacacagagcctgcctcagctgctcgcacagattacttcagggctggaaaagtcacacagacacacaaaatgtcacaatcctgtccctcactcaacacaaaccccaaaacacagagagcctgcctcagtacactcaaacaacctcaaagctgcatcatcacacaatcacacacaagcacagccctgacaacccacacaccccaaggcacgcacccacagccagcctcagggcccacaggggcactgtcaacacaggggtgtgcccagaggcctacacagaagcagcgtcagtaccctcaggatctgaggtcccaacacgtgctcgctcacacacacggcctgttagaattcacctgtgtatctcacgcatatgcacacgcacagccccccagtgggtctcttgagtcccgtgcagacacacacagccacacacactgccttgccaaaaataccccgtgtctcccctgccactcacctcactcccattccctgagccctgatccatgcctcagcttagactgcagaggaactactcatttatttgggatccaaggcccccaacccacagtaccgtccccaataaactgcagccgagctccccacaaaaaaaaaaaaaaaa

SEQ ID NO: 29 - DNA, 4737 bp, Homo sapiens
ggtttgaaaggaaggcagagagggcactgggaggaggcagtgggagggcggagggcgggggccttcggggtgggcgcccagggtagggcaggtggccgcggcgtggaggcagggagaatgcgactctccaaaaccctcgtcgacatggacatggccgactacagtgctgcactggacccagcctacaccaccctggaatttgagaatgtgcaggtgttgacgatgggcaatgacacgtccccatcagaaggcaccaacctcaacgcgcccaacagcctgggtgtcagcgccctgtgtgccatctgcggggaccgggccacgggcaaacactacggtgcctcgagctgtgacggctgcaagggcttcttccggaggagcgtgcggaagaaccacatgtactcctgcagatttagccggcagtgcgtggtggacaaagacaagaggaaccagtgccgctactgcaggctcaagaaatgcttccgggctggcatgaagaaggaagccgtccagaatgagcgggaccggatcagcactcgaaggtcaagctatgaggacagcagcctgccctccatcaatgcgctcctgcaggcggaggtcctgtcccgacagatcacctcccccgtctccgggatcaacggcgacattcgggcgaagaagattgccagcatcgcagatgtgtgtgagtccatgaaggagcagctgctggttctcgttgagtgggccaagtacatcccagctttctgcgagctccccctggacgaccaggtggccctgctcagagcccatgctggcgagcacctgctgctcggagccaccaagagatccatggtgttcaaggacgtgctgctcctaggcaatgactacattgtccctcggcactgcccggagctggcggagatgagccgggtgtccatacgcatccttgacgagctggtgctgcccttccaggagctgcagatcgatgacaatgagtatgcctacctcaaagccatcatcttctttgacccagatgccaaggggctgagcgatccagggaagatcaagcggctgcgttcccaggtgcaggtgagcttggaggactacatcaacgaccgccagtatgactcgcgtggccgctttggagagctgctgctgctgctgcccaccttgcagagcatcacctggcagatgatcgagcagatccagttcatcaagctcttcggcatggccaagattgacaacctgttgcaggagatgctgctgggagggtcccccagcgatgcaccccatgcccaccaccccctgcaccctcacctgatgcaggaacatatgggaaccaacgtcatcgttgccaacacaatgcccactcacctcagcaacggacagatgtgtgagtggccccgacccaggggacaggcagccacccctgagaccccacagccctcaccgccaggtggctcagggtctgagccctataagctcctgccgggagccgtcgccacaatcgtcaagcccctctctgccatcccccagccgaccatcaccaagcaggaagttatctagcaagccgctggggcttgggggctccactggctccccccagccccctaagagagcacctggtgatcacgtggtcacggcaaaggaagacgtgatgccaggaccagtcccagagcaggaatgggaaggatgaagggcccgagaacatggcctaagggccacatcccactgccacccttgacgccctgctctggataacaagactttgacttggggagacctctactgccttggacaacttttctcatgttgaagccactgccttcaccttcaccttcatccatgtccaacccccgacttcatcccaaaggacagccgcctggagatgacttgaggccttacttaaacccagctcccttcttccctagcctggtgcttctcctctcctagcccctgtcatggtgtccagacagagccctgtgaggctgggtccaattgtggcacttggggcaccttgctcctccttctgctgctgcccccacctctgctgcctccctctgctgtcaccttgctcagccatcccgtcttctccaacaccacctctccagaggccaaggaggccttggaaacgattcccccagtcattctgggaacatgttgtaagcactgactgggaccaggcaccaggcagggtctagaaggctgtggtgagggaagacgcctttctcctccaacccaacctcatcctccttcttcagggacttgggtgggtacttgggtgaggatccctgaaggccttcaacccgagaaaacaaacccaggttggcgactgcaacaggaacttggagtggagaggaaaagcatcagaaagaggcagaccatccaccaggcctttgagaaagggtagaattctggctggtagagcaggtgagatgggacattccaaagaacagcctgagccaaggcctagtggtagtaagaatctagcaagaattgaggaagaatggtgtgggagagggatgatgaagagagagagggcctgctggagagcatagggtctggaacaccaggctgaggtcctgatcagcttcaaggagtatgcagggagctgggcttccagaaaatgaacacagcagttctgcagaggacgggaggctggaagctgggaggtcaggtggggtggatgatataatgcgggtgagagtaatgaggcttggggctggagaggacaagatgggtaaaccctcacatcagagtgacatccaggaggaataagctcccagggcctgtctcaagctcttccttactcccaggcactgtcttaaggcatctgacatgcatcatctcatttaatcctcccttcctccctattaacctagagattgtttttgttttttattctcctcctccctccccgccctcacccgccccactccctcctaacctagagattgttacagaagctgaaattgcgttctaagaggtgaagtgattttttttctgaaactcacacaactaggaagtggctgagtcaggacttgaacccaggtctccctggatcagaacaggagctcttaactacagtggctgaatagcttctccaaaggctccctgtgttctcaccgtgatcaagttgaggggcttccggctcccttctacagcctcagaaaccagactcgttcttctgggaaccctgcccactcccaggaccaagattggcctgaggctgcactaaaattcacttagggtcgagcatcctgtttgctgataaatattaaggagaattcatgactcttgacagcttttctctcttcactccccaagtcaaggggaggggtggcaggggtctgtttcctggaagtcaggctcatctggcctgttggcatgggggtgggacagtgtgcacagtgtgggggcaggggagggctaagcaggcctgggtttgagggctgctccggagaccgtcactccaggtgcattctggaagcattagaccccaggatggagcgaccagcatgtcatccatgtggaatcttggtggctttgaggacattctggaaaatgccactgaccagtgtgaacaaaagggatgtgttatggggctggaggtgtgattaggtaggagggaaactgttggaccgactcctgccccctgctcaacactgacccctctgagtggttggaggcagtgccccagtgcccagaaatcccaccattagtgattgttttttatgagaaagaggcgtggagaagtattggggcaatgtgtcagggaggaatcaccacatccctacggcagtcccagccaagcccccaatcccagcggagactgtgccctgctcagagctcccaagccttcccccaccacctcactcaagtgcccctgaaatccctgccagacggctcagcctggtctgcggtaaggcagggaggctggaaccatttctgggcattgtggtcattcccactgtgttcctccacctcctccctccagcgttgctcagacctctgtcttgggagaaaggttgagataagaatgtcccatggagtgccgtgggcaacagtggcccttcatgggaacaatctgttggagcagggggtcagttctctgctgggaatctacccctttctggaggagaaacccattccaccttaataactttattgtaatgtgagaaacacaaaacaaagtttacttttttgactctaagctgacatgatattagaaaatctctcgctctcttttttttttttttttttttttttggctacttgagttgtggtcctaaaacataaaatctgatggacaaacagagggttgctggggggacaagcgtgggcacaatttccccaccaagacaccctgatcttcaggcgggtctcaggagcttctaaaaatccgcatggctctcctgagagtggacagaggagaggagagggtcagaaatgaacgctcttctatttcttgtcattaccaagccaattacttttgccaaatttttctgtgatctgccctgattaagatgaattgtgaaatttacatcaagcaattatcaaagcgggctgggtcccatcagaacgacccacatctttctgtgggtgtgaatgtcattaggtcttgcgctgacccctgagcccccatcactgccgcctgatggggcaaagaaacaaaaaacatttcttactcttctgtgttttaacaaaagtttataaaacaaaataaatggcgcatatgttttctaaaaaaaaaaaaaaaaa

SEQ ID NO: 30 - DNA, 4558 bp, Homo sapiens
ggccatggtcagcgtgaacgcgcccctcggggctccagtggagagttcttacgacacgtccccatcagaaggcaccaacctcaacgcgcccaacagcctgggtgtcagcgccctgtgtgccatctgcggggaccgggccacgggcaaacactacggtgcctcgagctgtgacggctgcaagggcttcttccggaggagcgtgcggaagaaccacatgtactcctgcagatttagccggcagtgcgtggtggacaaagacaagaggaaccagtgccgctactgcaggctcaagaaatgcttccgggctggcatgaagaaggaagccgtccagaatgagcgggaccggatcagcactcgaaggtcaagctatgaggacagcagcctgccctccatcaatgcgctcctgcaggcggaggtcctgtcccgacagatcacctcccccgtctccgggatcaacggcgacattcgggcgaagaagattgccagcatcgcagatgtgtgtgagtccatgaaggagcagctgctggttctcgttgagtgggccaagtacatcccagctttctgcgagctccccctggacgaccaggtggccctgctcagagcccatgctggcgagcacctgctgctcggagccaccaagagatccatggtgttcaaggacgtgctgctcctaggcaatgactacattgtccctcggcactgcccggagctggcggagatgagccgggtgtccatacgcatccttgacgagctggtgctgcccttccaggagctgcagatcgatgacaatgagtatgcctacctcaaagccatcatcttctttgacccagatgccaaggggctgagcgatccagggaagatcaagcggctgcgttcccaggtgcaggtgagcttggaggactacatcaacgaccgccagtatgactcgcgtggccgctttggagagctgctgctgctgctgcccaccttgcagagcatcacctggcagatgatcgagcagatccagttcatcaagctcttcggcatggccaagattgacaacctgttgcaggagatgctgctgggagggtcccccagcgatgcaccccatgcccaccaccccctgcaccctcacctgatgcaggaacatatgggaaccaacgtcatcgttgccaacacaatgcccactcacctcagcaacggacagatgtgtgagtggccccgacccaggggacaggcagccacccctgagaccccacagccctcaccgccaggtggctcagggtctgagccctataagctcctgccgggagccgtcgccacaatcgtcaagcccctctctgccatcccccagccgaccatcaccaagcaggaagttatctagcaagccgctggggcttgggggctccactggctccccccagccccctaagagagcacctggtgatcacgtggtcacggcaaaggaagacgtgatgccaggaccagtcccagagcaggaatgggaaggatgaagggcccgagaacatggcctaagggccacatcccactgccacccttgacgccctgctctggataacaagactttgacttggggagacctctactgccttggacaacttttctcatgttgaagccactgccttcaccttcaccttcatccatgtccaacccccgacttcatcccaaaggacagccgcctggagatgacttgaggccttacttaaacccagctcccttcttccctagcctggtgcttctcctctcctagcccctgtcatggtgtccagacagagccctgtgaggctgggtccaattgtggcacttggggcaccttgctcctccttctgctgctgcccccacctctgctgcctccctctgctgtcaccttgctcagccatcccgtcttctccaacaccacctctccagaggccaaggaggccttggaaacgattcccccagtcattctgggaacatgttgtaagcactgactgggaccaggcaccaggcagggtctagaaggctgtggtgagggaagacgcctttctcctccaacccaacctcatcctccttcttcagggacttgggtgggtacttgggtgaggatccctgaaggccttcaacccgagaaaacaaacccaggttggcgactgcaacaggaacttggagtggagaggaaaagcatcagaaagaggcagaccatccaccaggcctttgagaaagggtagaattctggctggtagagcaggtgagatgggacattccaaagaacagcctgagccaaggcctagtggtagtaagaatctagcaagaattgaggaagaatggtgtgggagagggatgatgaagagagagagggcctgctggagagcatagggtctggaacaccaggctgaggtcctgatcagcttcaaggagtatgcagggagctgggcttccagaaaatgaacacagcagttctgcagaggacgggaggctggaagctgggaggtcaggtggggtggatgatataatgcgggtgagagtaatgaggcttggggctggagaggacaagatgggtaaaccctcacatcagagtgacatccaggaggaataagctcccagggcctgtctcaagctcttccttactcccaggcactgtcttaaggcatctgacatgcatcatctcatttaatcctcccttcctccctattaacctagagattgtttttgttttttattctcctcctccctccccgccctcacccgccccactccctcctaacctagagattgttacagaagctgaaattgcgttctaagaggtgaagtgattttttttctgaaactcacacaactaggaagtggctgagtcaggacttgaacccaggtctccctggatcagaacaggagctcttaactacagtggctgaatagcttctccaaaggctccctgtgttctcaccgtgatcaagttgaggggcttccggctcccttctacagcctcagaaaccagactcgttcttctgggaaccctgcccactcccaggaccaagattggcctgaggctgcactaaaattcacttagggtcgagcatcctgtttgctgataaatattaaggagaattcatgactcttgacagcttttctctcttcactccccaagtcaaggggaggggtggcaggggtctgtttcctggaagtcaggctcatctggcctgttggcatgggggtgggacagtgtgcacagtgtgggggcaggggagggctaagcaggcctgggtttgagggctgctccggagaccgtcactccaggtgcattctggaagcattagaccccaggatggagcgaccagcatgtcatccatgtggaatcttggtggctttgaggacattctggaaaatgccactgaccagtgtgaacaaaagggatgtgttatggggctggaggtgtgattaggtaggagggaaactgttggaccgactcctgccccctgctcaacactgacccctctgagtggttggaggcagtgccccagtgcccagaaatcccaccattagtgattgttttttatgagaaagaggcgtggagaagtattggggcaatgtgtcagggaggaatcaccacatccctacggcagtcccagccaagcccccaatcccagcggagactgtgccctgctcagagctcccaagccttcccccaccacctcactcaagtgcccctgaaatccctgccagacggctcagcctggtctgcggtaaggcagggaggctggaaccatttctgggcattgtggtcattcccactgtgttcctccacctcctccctccagcgttgctcagacctctgtcttgggagaaaggttgagataagaatgtcccatggagtgccgtgggcaacagtggcccttcatgggaacaatctgttggagcagggggtcagttctctgctgggaatctacccctttctggaggagaaacccattccaccttaataactttattgtaatgtgagaaacacaaaacaaagtttacttttttgactctaagctgacatgatattagaaaatctctcgctctcttttttttttttttttttttttttggctacttgagttgtggtcctaaaacataaaatctgatggacaaacagagggttgctggggggacaagcgtgggcacaatttccccaccaagacaccctgatcttcaggcgggtctcaggagcttctaaaaatccgcatggctctcctgagagtggacagaggagaggagagggtcagaaatgaacgctcttctatttcttgtcattaccaagccaattacttttgccaaatttttctgtgatctgccctgattaagatgaattgtgaaatttacatcaagcaattatcaaagcgggctgggtcccatcagaacgacccacatctttctgtgggtgtgaatgtcattaggtcttgcgctgacccctgagcccccatcactgccgcctgatggggcaaagaaacaaaaaacatttcttactcttctgtgttttaacaaaagtttataaaacaaaataaatggcgcatatgttttctaaaaaaaaaaaaaaaaa

SEQ ID NO: 31 - DNA, 1240 bp, Homo sapiens
cacattgttctgatcatctgaagatcagctattagaagagaaagatcagttaagtcctttggacctgatcagcttgatacaagaactactgatttcaacttctttggcttaattctctcggaaacgatgaaatatacaagttatatcttggcttttcagctctgcatcgttttgggttctcttggctgttactgccaggacccatatgtaaaagaagcagaaaaccttaagaaatattttaatgcaggtcattcagatgtagcggataatggaactcttttcttaggcattttgaagaattggaaagaggagagtgacagaaaaataatgcagagccaaattgtctccttttacttcaaactttttaaaaactttaaagatgaccagagcatccaaaagagtgtggagaccatcaaggaagacatgaatgtcaagtttttcaatagcaacaaaaagaaacgagatgacttcgaaaagctgactaattattcggtaactgacttgaatgtccaacgcaaagcaatacatgaactcatccaagtgatggctgaactgtcgccagcagctaaaacagggaagcgaaaaaggagtcagatgctgtttcgaggtcgaagagcatcccagtaatggttgtcctgcctgcaatatttgaattttaaatctaaatctatttattaatatttaacattatttatatggggaatatatttttagactcatcaatcaaataagtatttataatagcaacttttgtgtaatgaaaatgaatatctattaatatatgtattatttataattcctatatcctgtgactgtctcacttaatcctttgttttctgactaattaggcaaggctatgtgattacaaggctttatctcaggggccaactaggcagccaacctaagcaagatcccatgggttgtgtgtttatttcacttgatgatacaatgaacacttataagtgaagtgatactatccagttactgccggtttgaaaatatgcctgcaatctgagccagtgctttaatggcatgtcagacagaacttgaatgtgtcaggtgaccctgatgaaaacatagcatctcaggagatttcatgcctggtgcttccaaatattgttgacaactgtgactgtacccaaatggaaagtaactcatttgttaaaattatcaatatctaatatatatgaataaagtgtaagttcacaacaaaaaaaaaaaaaaaaaaaaaaaaaaaaaa

SEQ ID NO: 32 - DNA, 1629 bp, Homo sapiens
acacatcaggggcttgctcttgcaaaaccaaaccacaagacagacttgcaaaagaaggcatgcacagctcagcactgctctgttgcctggtcctcctgactggggtgagggccagcccaggccagggcacccagtctgagaacagctgcacccacttcccaggcaacctgcctaacatgcttcgagatctccgagatgccttcagcagagtgaagactttctttcaaatgaaggatcagctggacaacttgttgttaaaggagtccttgctggaggactttaagggttacctgggttgccaagccttgtctgagatgatccagttttacctggaggaggtgatgccccaagctgagaaccaagacccagacatcaaggcgcatgtgaactccctgggggagaacctgaagaccctcaggctgaggctacggcgctgtcatcgatttcttccctgtgaaaacaagagcaaggccgtggagcaggtgaagaatgcctttaataagctccaagagaaaggcatctacaaagccatgagtgagtttgacatcttcatcaactacatagaagcctacatgacaatgaagatacgaaactgagacatcagggtggcgactctatagactctaggacataaattagaggtctccaaaatcggatctggggctctgggatagctgacccagccccttgagaaaccttattgtacctctcttatagaatatttattacctctgatacctcaacccccatttctatttatttactgagcttctctgtgaacgatttagaaagaagcccaatattataatttttttcaatatttattattttcacctgtttttaagctgtttccatagggtgacacactatggtatttgagtgttttaagataaattataagttacataagggaggaaaaaaaatgttctttggggagccaacagaagcttccattccaagcctgaccacgctttctagctgttgagctgttttccctgacctccctctaatttatcttgtctctgggcttggggcttcctaactgctacaaatactcttaggaagagaaaccagggagcccctttgatgattaattcaccttccagtgtctcggagggattcccctaacctcattccccaaccacttcattcttgaaagctgtggccagcttgttatttataacaacctaaatttggttctaggccgggcgcggtggctcacgcctgtaatcccagcactttgggaggctgaggcgggtggatcacttgaggtcaggagttcctaaccagcctggtcaacatggtgaaaccccgtctctactaaaaatacaaaaattagccgggcatggtggcgcgcacctgtaatcccagctacttgggaggctgaggcaagagaattgcttgaacccaggagatggaagttgcagtgagctgatatcatgcccctgtactccagcctgggtgacagagcaagactctgtctcaaaaaataaaaataaaaataaatttggttctaatagaactcagttttaactagaatttattcaattcctctgggaatgttacattgtttgtctgtcttcatagcagattttaattttgaataaataaatgtatcttattcacatc

SEQ ID NO: 33 - DNA, 822 bp, Homo sapiens
agttccctatcactctctttaatcactactcacagtaacctcaactcctgccacaatgtacaggatgcaactcctgtcttgcattgcactaagtcttgcacttgtcacaaacagtgcacctacttcaagttctacaaagaaaacacagctacaactggagcatttactgctggatttacagatgattttgaatggaattaataattacaagaatcccaaactcaccaggatgctcacatttaagttttacatgcccaagaaggccacagaactgaaacatcttcagtgtctagaagaagaactcaaacctctggaggaagtgctaaatttagctcaaagcaaaaactttcacttaagacccagggacttaatcagcaatatcaacgtaatagttctggaactaaagggatctgaaacaacattcatgtgtgaatatgctgatgagacagcaaccattgtagaatttctgaacagatggattaccttttgtcaaagcatcatctcaacactgacttgataattaagtgcttcccacttaaaacatatcaggccttctatttatttaaatatttaaattttatatttattgttgaatgtatggtttgctacctattgtaactattattcttaatcttaaaactataaatatggatcttttatgattctttttgtaagccctaggggctctaaaatggtttcacttatttatcccaaaatatttattattatgttgaatgttaaatatagtatctatgtagattggttagtaaaactatttaataaatttgataaatataaaaaaaaaaaaaaaaaaaaaaaaaa

SEQ ID NO: 34 - DNA, 1848 bp, Homo sapiens
gctggagtgcaatggtgaaattatagcagactgcagtcttcaactcctgacctcaagcaattgtcctgcctcctcaacttcctgactacaggtgtgcatgaggactacaggcaggcatgtgccaacacatgcagctttttttttttttttttttcagagatgtggtctcgctttgttgcctacactggtctcaaactcttggcctcaagggatcctcccacctcggcttcccaaagtgcagagattacagtctcattttctctctctctgcattaatcaagaatgagagaaccctccaggggacaagatgaaggggaaatagatgatgtgcaaagaaatccttgctttatgaggggaaaaagtgttcctcatgaagttcaacaaaatgatgcaggtaaagcagttagctagcacctggcacatggcagacactcatagctgcctaaggcattggagaactggatcgtgctgcagccagaggcacctgcagagcctcatgggctggctgctgcagggtgtggctgattgagagtgcttttgtgagttggcctgcagggtacacttggtaacgtgccacagctctcaggaaagtgacctaagttggatttttctgcatggacatagaattgcaaaaaattctcatttgcatggagatggggagtttatttttcctagaagctgcatgtcaagacccagaagaaagaggcatttcataataatgattaatcagctatatcttaaagaagaaagaaaacaattaaggaaatacaatactaagaaaacaaggggaaaaaacaatctccccaaggtggatccacccagcaaaccttgacagcatttcctcttatccacctgaataaaaatgaccagccctttccaaatggcagagagcactgagaggagacacaaggagcagcccgcaagcaccaagtgagaggcatgaagttacagtgtgtttccctttggctcctgggtacaatactgatattgtgctcagtagacaaccacggtctcaggagatgtctgatttccacagacatgcaccatatagaagagagtttccaagaaatcaaaagagccatccaagctaaggacaccttcccaaatgtcactatcctgtccacattggagactctgcagatcattaagcccttagatgtgtgctgcgtgaccaagaacctcctggcgttctacgtggacagggtgttcaaggatcatcaggagccaaaccccaaaatcttgagaaaaatcagcagcattgccaactctttcctctacatgcagaaaactctgcggcaatgtcaggaacagaggcagtgtcactgcaggcaggaagccaccaatgccaccagagtcatccatgacaactatgatcagctggaggtccacgctgctgccattaaatccctgggagagctcgacgtctttctagcctggattaataagaatcatgaagtaatgttctcagcttgatgacaaggaacctgtatagtgatccagggatgaacaccccctgtgcggtttactgtgggagacagcccaccttgaaggggaaggagatggggaaggccccttgcagctgaaagtcccactggctggcctcaggctgtcttattccgcttgaaaatagccaaaaagtctactgtggtatttgtaataaactctatctgctgaaagggcctgcaggccatcctgggagtaaagggctgccttcccatctaatttattgtaaagtcatatagtccatgtctgtgatgtgagccaagtgatatcctgtagtacacattgtactgagtggtttttctgaataaattccatattttacctatgaaaaaaaaaaaaaaaaaa

SEQ ID NO: 35 - DNA, 3366 bp, Homo sapiens
ctcttttgcttctgcagacattcccggcactggccgactggcgggaggacctccccgcgcgccccgcacaccggctcctgcgcgcaccccaacagagcgcagcgccaggagtccagaagcgggcgggacgccctccgggtcccttacagtgccccttctcgacctggggcaggtcctcccggcccggcccgaacatgctggacggcctaaagatggaggagaacttccaaagcgcgatcgacacctcggcctccttctcctcgctgctgggcagagcggtgagccccaagtctgtctgcgagggctgtcagcgggtcatcttggacaggtttctgctgcggctcaacgacagcttctggcatgagcagtgcgtgcagtgcgcctcctgcaaagagcccctggagaccacctgcttctaccgggacaagaagctgtactgcaagtatgactacgagaagctgtttgctgttaaatgtgggggctgcttcgaggccatcgctcccaatgagtttgttatgcgggcccagaagagtgtataccacctgagctgcttctgctgctgtgtctgcgagcgacagcttcagaagggtgatgagtttgtcctgaaggaggggcagctgctctgcaaaggggactatgagaaggagcgggagctgctcagcctggtgagcccagcagcctcagactcaggtaaaagtgatgatgaagaaagtctctgcaagtcagcccatggggcagggaaaggaactgctgaggaaggcaaggaccataagcgccccaaacgtccgagaaccatcttgacaactcaacagaggcgagcattcaaggcctcatttgaagtatcctccaagccctgcaggaaggtgagagagactctggctgcagagacagggctgagtgtccgtgtcgtccaggtgtggttccaaaaccagagagcgaagatgaagaagctggccaggcgacagcagcagcagcagcaagatcagcagaacacccagaggctgagctctgctcagacaaacggtggtgggagtgctgggatggaaggaatcatgaacccctacacggctctgcccaccccacagcagctcctggccatcgagcagagtgtctacagctcagatcccttccgacagggtctcaccccaccccagatgcctggagaccacatgcacccttatggtgccgagccccttttccatgacctggatagcgacgacacctccctcagtaacctgggtgattgtttcctagcaacctcagaagctgggcctctgcagtccagagtgggaaaccccattgaccatctgtactccatgcagaattcttacttcacatcttgagtcttcccctagagttctgtgactaggctcccatatggaacaaccatattctttgaggggtcactggctttaggacagggaggccagggaagaggtgggttggggagggagttttgttggggatgctgttgtataatgatatggtgtagctcagcatttccaaagactgaatacattatggattgcatagtttaatgtttctaataagagtcttagcattagatatgaagacgtgtttatcattaaggacagagacttttaatatagacattctcatgcaaactagatacttagggactcctaacaacttcccaccatgtcggggaagctcttgtcaagaggtgcatatgtctatccatctacacaccaatagacagaaggacagatagatagatgtgtgtgtgtgagtgtgtaacctttcgtattttaccctcaaagtttattcctaattataacagacaccaactgtacagcaaaagtaactttattttcagtgtgaactatatttaaggaaatgcttgatgcacttaagttataaaatgagataatttacttttataaactttatttttagcttgacaagacttgtcagcagggcagagagggctgctccacctagccccatagctttgagtgctggggttcattctgttttcagagtgtctttcagatctggaaagaaattctgtgtggctgatggtgttctctcttgcattcttgctctctttggggttgaatcactgggcaggggtgggacagaataatctctgatcatgttctgagaaaatgtaaagcccagactcctgggctttcttttaaattctgacaagtggttgttgggcagtgctaggatgattggttcagctcttgagcttcagcatctgcaaatgtggatgaggctaatagtatgtacctacctcactgggaaacaccaaggcttaattcattcccaggacacatgagcagggctgagactaatatctgatatttgtttaagatacaaccaggccactcacttggcaaaggagggtacatagggttgcagagcaggagggctcctgaactccagagggcagttctgcctgctgaagtccctctgcaaagcctgtgctgaaggagacaccagctcagagcagttcagagggatcccagagtcccagagtggggaggaggtgaaggctgaggggatagaggagggcctggtggtgttctagagcagggttgggcaaactcctgcttgcgggcctgctttctatggcttgccagcaaagaatggtttttactttttttttgaggtcattaaaaaaaaggagaagaagaatatataacaggctgtctgtggcctggaaagcctgaaatatttgctatctgtattgtctggcccttacagaaaaagtttggggccccttgttttagagggtctgtttctaaagaacctcatggcgctcatagaggcagaaggttccagtggaaacccttggctcttccttccaactcactcctctgatcctcggcacagaagacccagcagccattgtacatggggacagttccacaccctggtctccagttgcggtgctaggatggtattgttctgtgctaggaagtctcctgggaacccagaatgagttggtggggaagacagcgggtcactgtggacccatccaggaggggccaggataggcttggcctcatttctggggacatcattggagacttgaacacagagacacgtccctatcactctggcaaggccagagggaacatgtccccttatggtagagtctatgttgtgtgatttttgtgctcttgtttataatttatgcaaaccaccaagaaacccaaaccagtctgatgagtgaaaattatgcagatgctgtatggccccacaggtttctgtggtaaagaccagttggagaatgtaggagatactatgtgagtgaaaatgaatagagatccttattccactccttaatggcataccaagatgaaattaaaatctcttacaaatgaaaaaaaaaaa

SEQ ID NO: 36 - DNA, 3555 bp, Homo sapiens
agaagctgcaggatccgccccggcgaagcagggccgactcgcacccaggaccctgggcctctgccttccctcctagccttggagaagcaactggccctctcctcccgctgaggagcgacgcgggctggtaggacgtcccgggaaggccggcagctcgcgaccacgtcccggcccagcctgggcgcgccgaggagcagagccagcggccggcgttcgctccggctccctccccggcgctccgaagccgagggcggctcctccggctgcagtctcgggggcgacgccttcccgggcagaagcttccagcagcgctccgcaacttctctctgctccagtcactgggagagagctcgcctaccaggtcctcccggcccggcccgaacatgctggacggcctaaagatggaggagaacttccaaagcgcgatcgacacctcggcctccttctcctcgctgctgggcagagcggtgagccccaagtctgtctgcgagggctgtcagcgggtcatcttggacaggtttctgctgcggctcaacgacagcttctggcatgagcagtgcgtgcagtgcgcctcctgcaaagagcccctggagaccacctgcttctaccgggacaagaagctgtactgcaagtatgactacgagaagctgtttgctgttaaatgtgggggctgcttcgaggccatcgctcccaatgagtttgttatgcgggcccagaagagtgtataccacctgagctgcttctgctgctgtgtctgcgagcgacagcttcagaagggtgatgagtttgtcctgaaggaggggcagctgctctgcaaaggggactatgagaaggagcgggagctgctcagcctggtgagcccagcagcctcagactcaggtaaaagtgatgatgaagaaagtctctgcaagtcagcccatggggcagggaaaggaactgctgaggaaggcaaggaccataagcgccccaaacgtccgagaaccatcttgacaactcaacagaggcgagcattcaaggcctcatttgaagtatcctccaagccctgcaggaaggtgagagagactctggctgcagagacagggctgagtgtccgtgtcgtccaggtgtggttccaaaaccagagagcgaagatgaagaagctggccaggcgacagcagcagcagcagcaagatcagcagaacacccagaggctgagctctgctcagacaaacggtggtgggagtgctgggatggaaggaatcatgaacccctacacggctctgcccaccccacagcagctcctggccatcgagcagagtgtctacagctcagatcccttccgacagggtctcaccccaccccagatgcctggagaccacatgcacccttatggtgccgagccccttttccatgacctggatagcgacgacacctccctcagtaacctgggtgattgtttcctagcaacctcagaagctgggcctctgcagtccagagtgggaaaccccattgaccatctgtactccatgcagaattcttacttcacatcttgagtcttcccctagagttctgtgactaggctcccatatggaacaaccatattctttgaggggtcactggctttaggacagggaggccagggaagaggtgggttggggagggagttttgttggggatgctgttgtataatgatatggtgtagctcagcatttccaaagactgaatacattatggattgcatagtttaatgtttctaataagagtcttagcattagatatgaagacgtgtttatcattaaggacagagacttttaatatagacattctcatgcaaactagatacttagggactcctaacaacttcccaccatgtcggggaagctcttgtcaagaggtgcatatgtctatccatctacacaccaatagacagaaggacagatagatagatgtgtgtgtgtgagtgtgtaacctttcgtattttaccctcaaagtttattcctaattataacagacaccaactgtacagcaaaagtaactttattttcagtgtgaactatatttaaggaaatgcttgatgcacttaagttataaaatgagataatttacttttataaactttatttttagcttgacaagacttgtcagcagggcagagagggctgctccacctagccccatagctttgagtgctggggttcattctgttttcagagtgtctttcagatctggaaagaaattctgtgtggctgatggtgttctctcttgcattcttgctctctttggggttgaatcactgggcaggggtgggacagaataatctctgatcatgttctgagaaaatgtaaagcccagactcctgggctttcttttaaattctgacaagtggttgttgggcagtgctaggatgattggttcagctcttgagcttcagcatctgcaaatgtggatgaggctaatagtatgtacctacctcactgggaaacaccaaggcttaattcattcccaggacacatgagcagggctgagactaatatctgatatttgtttaagatacaaccaggccactcacttggcaaaggagggtacatagggttgcagagcaggagggctcctgaactccagagggcagttctgcctgctgaagtccctctgcaaagcctgtgctgaaggagacaccagctcagagcagttcagagggatcccagagtcccagagtggggaggaggtgaaggctgaggggatagaggagggcctggtggtgttctagagcagggttgggcaaactcctgcttgcgggcctgctttctatggcttgccagcaaagaatggtttttactttttttttgaggtcattaaaaaaaaggagaagaagaatatataacaggctgtctgtggcctggaaagcctgaaatatttgctatctgtattgtctggcccttacagaaaaagtttggggccccttgttttagagggtctgtttctaaagaacctcatggcgctcatagaggcagaaggttccagtggaaacccttggctcttccttccaactcactcctctgatcctcggcacagaagacccagcagccattgtacatggggacagttccacaccctggtctccagttgcggtgctaggatggtattgttctgtgctaggaagtctcctgggaacccagaatgagttggtggggaagacagcgggtcactgtggacccatccaggaggggccaggataggcttggcctcatttctggggacatcattggagacttgaacacagagacacgtccctatcactctggcaaggccagagggaacatgtccccttatggtagagtctatgttgtgtgatttttgtgctcttgtttataatttatgcaaaccaccaagaaacccaaaccagtctgatgagtgaaaattatgcagatgctgtatggccccacaggtttctgtggtaaagaccagttggagaatgtaggagatactatgtgagtgaaaatgaatagagatccttattccactccttaatggcataccaagatgaaattaaaatctcttacaaatgaaaaaaaaaaa

SEQ ID NO: 37 - DNA, 1348 bp, Homo sapiens
gcggggggcgcgcgacgtgaccacccggactcgaagcccgccccgcccccgcccggctcgccggctccggggtctgctccgggggtcgcggacgcggggccgggcggcggagccggcgccagagcatgcggggcgcggcgcgggcggcctgggggcgcgcggggcagccgtggccgcgaccccccgccccgggcccgcccccgccgccgctcccgctgctgctcctgctcctggccgggctgctgggcggcgcgggcgcgcagtactccagcgaccggtgcagctggaaggggagcgggctgacgcacgaggcacacaggaaggaggtggagcaggtgtatctgcgctgtgcggcgggtgccgtggagtggatgtacccaacaggtgctctcatcgttaacctgcggcccaacaccttctcgcctgcccggcacctgaccgtgtgcatcaggtccttcacggactcctcgggggccaatatttatttggaaaaaactggagaactgagactgctggtaccggacggggacggcaggcccggccgggtgcagtgttttggcctggagcagggcggcctgttcgtggaggccacgccgcagcaggatatcggccggaggaccacaggcttccagtacgagctggttaggaggcacagggcgtcggacctgcacgagctgtctgcgccgtgccgtccctgcagtgacaccgaggtgctcctagccgtctgcaccagcgacttcgccgttcgaggctccatccagcaagttacccacgagcctgagcggcaggactcagccatccacctgcgcgtgagcagactctatcggcagaaaagcagggtcttcgagccggtgcccgagggtgacggccactggcaggggcgcgtcaggacgctgctggagtgtggcgtgcggccggggcatggcgacttcctcttcactggccacatgcacttcggggaggcgcggctcggctgtgccccacgcttcaaggacttccagaggatgtacagggatgcccaggagagggggctgaacccttgtgaggttggcacggactgactccgtgggccgctgcccttcctctcctgatgagtcacaggctgcggtgggcgctgcggtcctggtggggccgtgcggtgagggccgcgcgctgggagccgcatgccctgggcccaggcctgaccctggtaccgaagctgtggacgttctcgccacactcaaccccatgagcttccagccaaggatgccctggccgattggaaatgctgtaaaatgcaaactaagttattatatttttttttggtaaaaaagaaatgtccataggaaacaaaaaaaaaaaaaaaaaa

SEQ ID NO: 38 - DNA, 3546 bp, Homo sapiens
gctgacgcgcgctgacgcgcggagactttaggtgcatgttggcagcggcagcgcaagccacataaacaaaggcacattggcggccagggccagtccgcccggcggctcgcgcacggctccgcggtcccttttgcctgtccagccggccgcctgtccctgctccctccctccgtgaggtgtccgggttcccttcgcccagctctcccacccctacccgaccccggcgcccgggctcccagagggaactgcacttcggcagagttgaatgaatgaagagagacgcggagaactcctaaggaggagattggacaggctggactccccattgcttttctaaaaatcttggaaactttgtccttcattgaattacgacactgtccacctttaatttcctcgaaaacgcctgtaactcggctgaagccatgccttgtgttcaggcgcagtatgggtcctcgcctcaaggagccagccccgcttctcagagctacagttaccactcttcgggagaatacagctccgatttcttaactccagagtttgtcaagtttagcatggacctcaccaacactgaaatcactgccaccacttctctccccagcttcagtacctttatggacaactacagcacaggctacgacgtcaagccaccttgcttgtaccaaatgcccctgtccggacagcagtcctccattaaggtagaagacattcagatgcacaactaccagcaacacagccacctgcccccccagtctgaggagatgatgccgcactccgggtcggtttactacaagccctcctcgcccccgacgcccaccaccccgggcttccaggtgcagcacagccccatgtgggacgacccgggatctctccacaacttccaccagaactacgtggccactacgcacatgatcgagcagaggaaaacgccagtctcccgcctctccctcttctcctttaagcaatcgccccctggcaccccggtgtctagttgccagatgcgcttcgacgggcccctgcacgtccccatgaacccggagcccgccggcagccaccacgtggtggacgggcagaccttcgctgtgcccaaccccattcgcaagcccgcgtccatgggcttcccgggcctgcagatcggccacgcgtctcagctgctcgacacgcaggtgccctcaccgccgtcgcggggctccccctccaacgaggggctgtgcgctgtgtgtggggacaacgcggcctgccaacactacggcgtgcgcacctgtgagggctgcaaaggcttctttaagcgcacagtgcaaaaaaatgcaaaatacgtgtgtttagcaaataaaaactgcccagtggacaagcgtcgccggaatcgctgtcagtactgccgatttcagaagtgcctggctgttgggatggtcaaagaagtggttcgcacagacagtttaaaaggccggagaggtcgtttgccctcgaaaccgaagagcccacaggagccctctcccccttcgcccccggtgagtctgatcagtgccctcgtcagggcccatgtcgactccaacccggctatgaccagcctggactattccaggttccaggcgaaccctgactatcaaatgagtggagatgacacccagcatatccagcaattctatgatctcctgactggctccatggagatcatccggggctgggcagagaagatccctggcttcgcagacctgcccaaagccgaccaagacctgctttttgaatcagctttcttagaactgtttgtccttcgattagcatacaggtccaacccagtggagggtaaactcatcttttgcaatggggtggtcttgcacaggttgcaatgcgttcgtggctttggggaatggattgattccattgttgaattctcctccaacttgcagaatatgaacatcgacatttctgccttctcctgcattgctgccctggctatggtcacagagagacacgggctcaaggaacccaagagagtggaagaactgcaaaacaagattgtaaattgtctcaaagaccacgtgactttcaacaatggggggttgaaccgccccaattatttgtccaaactgttggggaagctcccagaacttcgtaccctttgcacacaggggctacagcgcattttctacctgaaattggaagacttggtgccaccgccagcaataattgacaaacttttcctggacactttacctttctaagacctcctcccaagcacttcaaaggaactggaatgataatggaaactgtcaagagggggcaagtcacatgggcagagatagccgtgtgagcagtctcagctcaagctgccccccatttctgtaaccctcctagcccccttgatccctaaagaaaacaaacaaacaaacaaaaactgttgctatttcctaacctgcaggcagaacctgaaagggcattttggctccggggcatcctggatttagaacatggactacacacaatacagtggtataaactttttattctcagtttaaaaatcagtttgttgttcagaagaaagattgctataatgtataatgggaaatgtttggccatgcttggttgttgcagttcagacaaatgtaacacacacacacatacacacacacacacacacacagagacacatcttaaggggacccacaagtattgccctttaacaagacttcaaagttttctgctgtaaagaaagctgtaatatatagtaaaactaaatgttgcgtgggtggcatgagttgaagaaggcaaaggcttgtaaatttacccaatgcagtttggctttttaaattattttgtgcctatttatgaataaatattacaaattctaaaagataagtgtgtttgcaaaaaaaaagaaaataaatacataaaaaagggacaagcatgttgattctaggttgaaaatgttataggcacttgctacttcagtaatgtctatattatataaatagtatttcagacactatgtagtctgttagattttataaagattggtagttatctgagcttaaacattttctcaattgtaaaataggtgggcacaagtattacacatcagaaaatcctgacaaaagggacacatagtgtttgtaacaccgtccaacattccttgtttgtaagtgttgtatgtaccgttgatgttgataaaaagaaagtttatatcttgattattttgttgtctaaagctaaacaaaacttgcatgcagcagcttttgactgtttccagagtgcttataatatacataactccctggaaataactgagcactttgaattttttttatgtctaaaattgtcagttaatttattattttgtttgagtaagaattttaatattgccatattctgtagtatttttctttgtatatttctagtatggcacatgatatgagtcactgcctttttttctatggtgtatgacagttagagatgctgattttttttctgataaattctttctttgagaaagacaattttaatgtttacaacaataaaccatgtaaatgaacagaaaaaaaaaaaaaaaaa

SEQ ID NO: 39 - DNA, 3604 bp, Homo sapiens
gcatctcctcctccctctccccgggctcctactggcctgaggttgagggcggctgggggctcggggcaggctccgcggcgttcccctccccaccccggccctccgttcagccgcgctcctccggggctgcggttcctactgcgcgagctgccagtggattcgctcttttcctccgtccgtggcccgcctgggcggccttgttctttccgcagcagccagataaccttctgttcggtgatgaaattatcactaatggttttcattcctgtgaaagtgatgaggaggatagagcctcacatgcaagctctagtgactggactccaaggccacggataggtgtctgtttcatgtggaatacctgacttcaggtcaagggatggtatttatgctcgccttgctgtagacttcccagatcttccagatcctcaagcgatgtttgatattgaatatttcagaaaagatccaagaccattcttcaagtttgcaaaggaaatatatcctggacaattccagccatctctctgtcacaaattcatagccttgtcagataaggaaggaaaactacttcgcaactatacccagaacatagacacgctggaacaggttgcgggaatccaaaggataattcagtgtcatggttcctttgcaacagcatcttgcctgatttgtaaatacaaagttgactgtgaagctgtacgaggagatatttttaatcaggtagttcctcgatgtcctaggtgcccagctgatgaaccgcttgctatcatgaaaccagagattgtgttttttggtgaaaatttaccagaacagtttcatagagccatgaagtatgacaaagatgaagttgacctcctcattgttattgggtcttccctcaaagtaagaccagtagcactaattccaagttccataccccatgaagtgcctcagatattaattaatagagaacctttgcctcatctgcattttgatgtagagcttcttggagactgtgatgtcataattaatgaattgtgtcataggttaggtggtgaatatgccaaactttgctgtaaccctgtaaagctttcagaaattactgaaaaacctccacgaacacaaaaagaattggcttatttgtcagagttgccacccacacctcttcatgtttcagaagactcaagttcaccagaaagaacttcaccaccagattcttcagtgattgtcacacttttagaccaagcagctaagagtaatgatgatttagatgtgtctgaatcaaaaggttgtatggaagaaaaaccacaggaagtacaaacttctaggaatgttgaaagtattgctgaacagatggaaaatccggatttgaagaatgttggttctagtactggggagaaaaatgaaagaacttcagtggctggaacagtgagaaaatgctggcctaatagagtggcaaaggagcagattagtaggcggcttgatggtaatcagtatctgtttttgccaccaaatcgttacattttccatggcgctgaggtatattcagactctgaagatgacgtcttatcctctagttcttgtggcagtaacagtgatagtgggacatgccagagtccaagtttagaagaacccatggaggatgaaagtgaaattgaagaattctacaatggcttagaagatgagcctgatgttccagagagagctggaggagctggatttgggactgatggagatgatcaagaggcaattaatgaagctatatctgtgaaacaggaagtaacagacatgaactatccatcaaacaaatcatagtgtaataattgtgcaggtacaggaattgttccaccagcattaggaactttagcatgtcaaaatgaatgtttacttgtgaactcgatagagcaaggaaaccagaaaggtgtaatatttataggttggtaaaatagattgtttttcatggataatttttaacttcattatttctgtacttgtacaaactcaacactaacttttttttttttaaaaaaaaaaaggtactaagtatcttcaatcagctgttggtcaagactaactttcttttaaaggttcatttgtatgataaattcatatgtgtatatataattttttttgttttgtctagtgagtttcaacatttttaaagttttcaaaaagccatcggaatgttaaattaatgtaaagggaacagctaatctagaccaaagaatggtattttcacttttctttgtaacattgaatggtttgaagtactcaaaatctgttacgctaaacttttgattctttaacacaattatttttaaacactggcattttccaaaactgtggcagctaactttttaaaatctcaaatgacatgcagtgtgagtagaaggaagtcaacaatatgtggggagagcactcggttgtctttacttttaaaagtaatacttggtgctaagaatttcaggattattgtatttacgttcaaatgaagatggcttttgtacttcctgtggacatgtagtaatgtctatattggctcataaaactaacctgaaaaacaaataaatgctttggaaatgtttcagttgctttagaaacattagtgcctgcctggatccccttagttttgaaatatttgccattgttgtttaaatacctatcactgtggtagagcttgcattgatcttttccacaagtattaaactgccaaaatgtgaatatgcaaagcctttctgaatctataataatggtacttctactggggagagtgtaatattttggactgctgttttccattaatgaggagagcaacaggcccctgattatacagttccaaagtaataagatgttaattgtaattcagccagaaagtacatgtctcccattgggaggatttggtgttaaataccaaactgctagccctagtattatggagatgaacatgatgatgtaacttgtaatagcagaatagttaatgaatgaaactagttcttataatttatctttatttaaaagcttagcctgccttaaaactagagatcaactttctcagctgcaaaagcttctagtctttcaagaagttcatactttatgaaattgcacagtaagcatttatttttcagaccatttttgaacatcactcctaaattaataaagtattcctctgttgctttagtatttattacaataaaaagggtttgaaatatagctgttctttatgcataaaacacccagctaggaccattactgccagagaaaaaaatcgtattgaatggccatttccctacttataagatgtctcaatctgaatttatttggctacactaaagaatgcagtatatttagttttccatttgcatgatgtttgtgtgctatagatgatattttaaattgaaaagtttgttttaaattatttttacagtgaagactgttttcagctctttttatattgtacatagtcttttatgtaatttactggcatatgttttgtagactgtttaatgactggatatcttccttcaacttttgaaatacaaaaccagtgttttttacttgtacactgttttaaagtctattaaaattgtcatttgacttttttctgttaacttaaaaaaaaaaaaaaaaa

SEQ ID NO: 40 - DNA, 1817 bp, Homo sapiens
cggacctccacactgagccatgcccacccccgacgccaccacgccacaggccaagggcttccgcagggccgtgtctgagctggacgccaagcaggcagaggccatcatgtccccgcggttcattgggcgcaggcagagcctcatcgaggacgcccgcaaggagcgggaggcggcggtggcagcagcggccgctgcagtcccctcggagcccggggaccccctggaggctgtggcctttgaggagaaggaggggaaggccgtgctaaacctgctcttctccccgagggccaccaagccctcggcgctgtcccgagctgtgaaggtgtttgagacgtttgaagccaaaatccaccatctagagacccggcccgcccagaggccgcgagctgggggcccccacctggagtacttcgtgcgcctcgaggtgcgccgaggggacctggccgccctgctcagtggtgtgcgccaggtgtcagaggacgtgcgcagccccgcggggcccaaggtcccctggttcccaagaaaagtgtcagagctggacaagtgtcatcacctggtcaccaagttcgaccctgacctggacttggaccacccgggcttctcggaccaggtgtaccgccagcgcaggaagctgattgctgagatcgccttccagtacaggcacggcgacccgattccccgtgtggagtacaccgccgaggagattgccacctggaaggaggtctacaccacgctgaagggcctctacgccacgcacgcctgcggggagcacctggaggcctttgctttgctggagcgcttcagcggctaccgggaagacaatatcccccagctggaggacgtctcccgcttcctgaaggagcgcacgggcttccagctgcggcctgtggccggcctgctgtccgcccgggacttcctggccagcctggccttccgcgtgttccagtgcacccagtatatccgccacgcgtcctcgcccatgcactcccctgagccggactgctgccacgagctgctggggcacgtgcccatgctggccgaccgcaccttcgcgcagttctcgcaggacattggcctggcgtccctgggggcctcggatgaggaaattgagaagctgtccacgctgtactggttcacggtggagttcgggctgtgtaagcagaacggggaggtgaaggcctatggtgccgggctgctgtcctcctacggggagctcctgcactgcctgtctgaggagcctgagattcgggccttcgaccctgaggctgcggccgtgcagccctaccaagaccagacgtaccagtcagtctacttcgtgtctgagagcttcagtgacgccaaggacaagctcaggagctatgcctcacgcatccagcgccccttctccgtgaagttcgacccgtacacgctggccatcgacgtgctggacagcccccaggccgtgcggcgctccctggagggtgtccaggatgagctggacacccttgcccatgcgctgagtgccattggctaggtgcacggcgtccctgagggcccttcccaacctcccctggtcctgcactgtcccggagctcaggccctggtgaggggctgggtcccgggtgccccccatgccctccctgctgccaggctcccactgcccctgcacctgcttctcagcgcaacagctgtgtgtgcccgtggtgaggttgtgctgcctgtggtgaggtcctgtcctggctcccagggtcctgggggctgctgcactgccctccgcccttccctgacactgtctgctgccccaatcaccgtcacaataaaagaaactgtggtctcta

SEQ ID NO: 41 - DNA, 1340 bp, Homo sapiens
cccggagccggaccggggccaccgcgcccgctctgctccgacaccgcgccccctggacagccgccctctcctccaggcccgtggggctggccctgcaccgccgagcttcccgggatgagggcccccggtgtggtcacccggcgcgccccaggtcgctgagggaccccggccaggcgcggagatgggggtgcacgaatgtcctgcctggctgtggcttctcctgtccctgctgtcgctccctctgggcctcccagtcctgggcgccccaccacgcctcatctgtgacagccgagtcctggagaggtacctcttggaggccaaggaggccgagaatatcacgacgggctgtgctgaacactgcagcttgaatgagaatatcactgtcccagacaccaaagttaatttctatgcctggaagaggatggaggtcgggcagcaggccgtagaagtctggcagggcctggccctgctgtcggaagctgtcctgcggggccaggccctgttggtcaactcttcccagccgtgggagcccctgcagctgcatgtggataaagccgtcagtggccttcgcagcctcaccactctgcttcgggctctgggagcccagaaggaagccatctcccctccagatgcggcctcagctgctccactccgaacaatcactgctgacactttccgcaaactcttccgagtctactccaatttcctccggggaaagctgaagctgtacacaggggaggcctgcaggacaggggacagatgaccaggtgtgtccacctgggcatatccaccacctccctcaccaacattgcttgtgccacaccctcccccgccactcctgaaccccgtcgaggggctctcagctcagcgccagcctgtcccatggacactccagtgccagcaatgacatctcaggggccagaggaactgtccagagagcaactctgagatctaaggatgtcacagggccaacttgagggcccagagcaggaagcattcagagagcagctttaaactcagggacagagccatgctgggaagacgcctgagctcactcggcaccctgcaaaatttgatgccaggacacgctttggaggcgatttacctgttttcgcacctaccatcagggacaggatgacctggagaacttaggtggcaagctgtgacttctccaggtctcacgggcatgggcactcccttggtggcaagagcccccttgacaccggggtggtgggaaccatgaagacaggatgggggctggcctctggctctcatggggtccaagttttgtgtattcttcaacctcattgacaagaactgaaaccaccaaaaaaaaaaaa

SEQ ID NO: 42 - DNA, 2535 bp, Homo sapiens
ttaaggccgcgctcgccagcctcggcggggcggctcccgccgccgcaaccaatggatctcctcctctgtttaaatagactcgccgtgtcaatcattttcttcttcgtcagcctcccttccaccgccatattgggccactaaaaaaagggggctcgtcttttcggggtgtttttctccccctcccctgtccccgcttgctcacggctctgcgactccgacgccggcaaggtttggagagcggctgggttcgcgggacccgcgggcttgcacccgcccagactcggacgggctttgccaccctctccgcttgcctggtcccctctcctctccgccctcccgctcgccagtccatttgatcagcggagactcggcggccgggccggggcttccccgcagcccctgcgcgctcctagagctcgggccgtggctcgtcggggtctgtgtcttttggctccgagggcagtcgctgggcttccgagaggggttcgggctgcgtaggggcgctttgttttgttcggttttgtttttttgagagtgcgagagaggcggtcgtgcagacccgggagaaagatgtcaaacgtgcgagtgtctaacgggagccctagcctggagcggatggacgccaggcaggcggagcaccccaagccctcggcctgcaggaacctcttcggcccggtggaccacgaagagttaacccgggacttggagaagcactgcagagacatggaagaggcgagccagcgcaagtggaatttcgattttcagaatcacaaacccctagagggcaagtacgagtggcaagaggtggagaagggcagcttgcccgagttctactacagacccccgcggccccccaaaggtgcctgcaaggtgccggcgcaggagagccaggatgtcagcgggagccgcccggcggcgcctttaattggggctccggctaactctgaggacacgcatttggtggacccaaagactgatccgtcggacagccagacggggttagcggagcaatgcgcaggaataaggaagcgacctgcaaccgacgattcttctactcaaaacaaaagagccaacagaacagaagaaaatgtttcagacggttccccaaatgccggttctgtggagcagacgcccaagaagcctggcctcagaagacgtcaaacgtaaacagctcgaattaagaatatgtttccttgtttatcagatacatcactgcttgatgaagcaaggaagatatacatgaaaattttaaaaatacatatcgctgacttcatggaatggacatcctgtataagcactgaaaaacaacaacacaataacactaaaattttaggcactcttaaatgatctgcctctaaaagcgttggatgtagcattatgcaattaggtttttccttatttgcttcattgtactacctgtgtatatagtttttaccttttatgtagcacataaactttggggaagggagggcagggtggggctgaggaactgacgtggagcggggtatgaagagcttgctttgatttacagcaagtagataaatatttgacttgcatgaagagaagcaattttggggaagggtttgaattgttttctttaaagatgtaatgtccctttcagagacagctgatacttcatttaaaaaaatcacaaaaatttgaacactggctaaagataattgctatttatttttacaagaagtttattctcatttgggagatctggtgatctcccaagctatctaaagtttgttagatagctgcatgtggcttttttaaaaaagcaacagaaacctatcctcactgccctccccagtctctcttaaagttggaatttaccagttaattactcagcagaatggtgatcactccaggtagtttggggcaaaaatccgaggtgcttgggagttttgaatgttaagaattgaccatctgcttttattaaatttgttgacaaaattttctcattttcttttcacttcgggctgtgtaaacacagtcaaaataattctaaatccctcgatatttttaaagatctgtaagtaacttcacattaaaaaatgaaatattttttaatttaaagcttactctgtccatttatccacaggaaagtgttatttttcaaggaaggttcatgtagagaaaagcacacttgtaggataagtgaaatggatactacatctttaaacagtatttcattgcctgtgtatggaaaaaccatttgaagtgtacctgtgtacataactctgtaaaaacactgaaaaattatactaacttatttatgttaaaagattttttttaatctagacaatatacaagccaaagtggcatgttttgtgcatttgtaaatgctgtgttgggtagaataggttttcccctcttttgttaaataatatggctatgcttaaaaggttgcatactgagccaagtataattttttgtaatgtgtgaaaaagatgccaattattgttacacattaagtaatcaataaagaaaacttccatagctattcattgagtcaaaaaaaaaaaaaaa

SEQ ID NO: 43 - DNA, 7104 bp, Homo sapiens
tgtgttcagtggcgattggagggtagacctgtgggcacggacgcacgccactttttctctgctgatccaggcaaatgtgcaataccaacatgtctgtacctactgatggtgctgtaaccacctcacagattccagcttcggaacaagagaccctggttagaccaaagccattgcttttgaagttattaaagtctgttggtgcacaaaaagacacttatactatgaaagaggttcttttttatcttggccagtatattatgactaaacgattatatgatgagaagcaacaacatattgtatattgttcaaatgatcttctaggagatttgtttggcgtgccaagcttctctgtgaaagagcacaggaaaatatataccatgatctacaggaacttggtagtagtcaatcagcaggaatcatcggactcaggtacatctgtgagtgagaacaggtgtcaccttgaaggtgggagtgatcaaaaggaccttgtacaagagcttcaggaagagaaaccttcatcttcacatttggtttctagaccatctacctcatctagaaggagagcaattagtgagacagaagaaaattcagatgaattatctggtgaacgacaaagaaaacgccacaaatctgatagtatttccctttcctttgatgaaagcctggctctgtgtgtaataagggagatatgttgtgaaagaagcagtagcagtgaatctacagggacgccatcgaatccggatcttgatgctggtgtatatcaagttactgtgtatcaggcaggggagagtgatacagattcatttgaagaagatcctgaaatttccttagctgactattggaaatgcacttcatgcaatgaaatgaatcccccccttccatcacattgcaacagatgttgggcccttcgtgagaattggcttcctgaagataaagggaaagataaaggggaaatctctgagaaagccaaactggaaaactcaacacaagctgaagagggctttgatgttcctgattgtaaaaaaactatagtgaatgattccagagagtcatgtgttgaggaaaatgatgataaaattacacaagcttcacaatcacaagaaagtgaagactattctcagccatcaacttctagtagcattatttatagcagccaagaagatgtgaaagagtttgaaagggaagaaacccaagacaaagaagagagtgtggaatctagtttgccccttaatgccattgaaccttgtgtgatttgtcaaggtcgacctaaaaatggttgcattgtccatggcaaaacaggacatcttatggcctgctttacatgtgcaaagaagctaaagaaaaggaataagccctgcccagtatgtagacaaccaattcaaatgattgtgctaacttatttcccctagttgacctgtctataagagaattatatatttctaactatataaccctaggaatttagacaacctgaaatttattcacatatatcaaagtgagaaaatgcctcaattcacatagatttcttctctttagtataattgacctactttggtagtggaatagtgaatacttactataatttgacttgaatatgtagctcatcctttacaccaactcctaattttaaataatttctactctgtcttaaatgagaagtacttggtttttttttttcttaaatatgtatatgacatttaaatgtaacttattattttttttgagaccgagtcttgctctgttacccaggctggagtgcagtggcgtgatcttggctcactgcaagctctgcctcccgggttcgcaccattctcctgcctcagcctcccaattagcttggcctacagtcatctgccaccacacctggctaattttttgtacttttagtagagacagggtttcaccgtgttagccaggatggtctcgatctcctgacctcgtgatccgcccacctcggcctcccaaagtgctgggattacaggcatgagccaccgcgtccggcctaaatgtcacttagtacctttgatataaagagaaaatgtgtgaaagatttagttttttgtttttttgtttgtttgtttgtttgtttgttttgagatgagtctctctgtcgcccaggctggagtgcagtgtcatgatctagcagtctccgcttcccgggttcaagccattctcctggctcagcctctggagcagctgggattacaggcatgcaccaccatgcccagctaatttttgtatttttagtagagatagggtttcaccatgttggccaggctggtcacgaactcctgacctcaagtgaggtcacccgcctcggcctcccgaagtgctgggattgcagatgtgagccaccatgtccagccaagaattagtatttaaattttagatactctttttttttttttttttttttttttttgagacagagtcttgctccatcacccatgctagagtgcagtggagtgatctcggctcactgcaacttccgccttctgggttcaagctattctcctgcctcagccttccaagtaactgggattacaggcatgtaccaccataccagctgatttttttgtatttttagtaaagacagggtttcaccatgttagccaggctgatcttgaactcctaaactcaagtgatctactcacctcagcctcccaaaatgctgggattacagatgtgaggcacctggcctcagatttttgatactcttaaaccttctgatccttagtttctctctccaaaatactctttctaggttaaaaaaaaaaaggctcttatatttggtgctatgtaaatgaaaatgttttttaggttttcttgatttaacaatagagacagggtctccctgtgttgcccaggctggtctcgaactcctgggctcaagagatcctcctgtcttggcctcgcaaagtgctaagtaggattacaggcgttagccaccacacccggctgtaaaaatgtacttattctccagcctcttttgtataaaccatagtaagggatgggagtaatgatgttatctgtgaaaatagccaccatttacccgtaagacaaaacttgttaaagcctcctgagtctaacctagattacatcaggccctttttcacacacaaaaaaatcctttatgggatttaatggaatctgttgtttccccctaagttgaaaaacaactctaagacactttaaagtaccttcttggcctgggttacatggttcccagcctaggtttcagacttttgcttaaggccagttttagaaacccgtgaattcagaaaagttaattcagaaatttgataaacagaattgttatttaaaaactaactggaaagattgttaagttctttctgaattattcagaaattatgcatcattttccttcaagaatgacagggtcagcatgtggaattccaagatacctcttgacttcctctcaagctccgtgtttggtcagtggaggcccatccgagctcagcactgagaagtgttagtttctttgggacccatctaccctgaccacatcatgatgttcatctgcagctgttgcaaggtgttcagattgtataaacataaatgtcacaaaaactttaaaagaagtgcaattctcaaaaggttaggtggactaaagcattctgtaaagcaactgctaataatgagcttacagtggatttgaatttgaaaaatatagtaacaagcctgtcaaatatctgcaagaactatggaataaaactactgatgcagtgaagacagttgaaaagatcaaacaaatgccaagctatatttataatgaacaaattcaagaaaaaggactacggaaagttcaggacatcaaagaagtcaggcaaaactcatcttgacccctgttgcaggcaaaggaacgcagctggaagaaaagatgatataacagttaacaggatgcagacatggcagaggtttcctaaaaatctcattatctataaccatttctatatttacatttgaaaatctcctttggagacttagaacctctaaattattgacttattttttatataaggtcactccgatgaaaggtgattacaaaatcatctacattgctgtctacaaaacagataatatggatgtttgatcgcatctcattgttaactctttactgatatgtttgtaaatacagaagtgaaatgtggacataaaatagttacgctatttggttaatggtactagacaacatgtaattaatgacattcaaaaatttatggctagtgatatatataaagtaaaattttctttgcagtaaaatatgccctttattatagaagggaggatataaggaaccaacagtttgtatgaaaatagctcaaataatatcttttattttgattttaatatttcttattttggtttattagtgtcttagaacaaaatggccttatataatgaagcctagttatgctggactgttttgatctcttttaattgttctgacagatagttggggatgagagccgaataaggtttgcctgaaataactgacactatataatttctgctttggcaaatactaagttctaacttgtcattcctggtagaacaagctttatttttcgagcctagcaatgatctagaagcagatgttatctcagtgccttttgcaatttgttgtgtgggtttttttttttttaaagccacacaataattttggaaaacaatgtatgggtagaacatgtgtctgttaattgcacacaaaaccacttttaatgggtacagagttaaatttgaaggaataagttctagctgaagtattatgaactccaaataatgctttgaggacctccaaaggtaaaagtactaatccctttggccatttattgagagagagagagagagagagtagggtgactatagttaatgtattgaatgttcttgctacaaataaatgatatttgagctgatgggtgtgctaattacactgatttgatcaatacccattgtatgtgaaacagtacatacaccatatttacaattatgtatttaacatttaaaatttctaatataagtatctctcaaactgtggattaacttcttgatttatatttaaatatgaatcttaagcaaaacagtgaaaataaccatcttgatttagtgtttttctcccatatgtgaattgtatatacttaggtgaagacaataaaatcaactgaactgtaagcttagaataggactgaggtaattctgcacagcaactttactaatggtacattgttgcttcaaaactctctctctctctctctgtctgtctcaataaatggccaaagggattagtagtttacctgtggaggtcctccaagcattatttggagttgataatacttcagctacaaccaagcagaatctcttttttttggaggtcctcgaagcattatttggagttgataatacttcagcttcaatttggagttgataatatttcagctagaacctagtagaatctgtttttttcctttggaggtcctcaaagcattattggagttcataatactgaagctagaaccaagcagaatctgtttttttctgaggagtatcggtagcataaatgtgattataaacatagtacacttgatatatggaggcagtgacagctatttttacaaaatttaaatctgcaaatggattcaacatgtttatgggttattaaaattgtctgatttcttaggttctttatagtacacgtgttgaaaataaatgattaagaattgtttcaagaatgcaattatttgatcttaaatttttatgagttgttaaaatagaaattatttgaatatcatatatttgggtaacaaaaggcacaagtctgaatgtgtttctttttctggaatggccatgcctgcccactttagaaatacaaatatcactgggcagcttgaagcagttgggagcctccaatgagagcaacttgagagaatgatgttgcaagttagtaggagtaagaaatgctgtgttctccctgtcttctcttaggtcacatggcagcctggcctaagtgatcgtgaatggtctataagggaggtagctgggacagggaggggagtttgggctagccaccgtaccacttgtcagcgtgaaaagtaagattgtaattgcctgtttagttttctgcctcatctttgaaagttccaccaagctgggaacctcttgattgtgaggcacaaatgtaagtacatcagaaaaaaacaaaaaaactggctttaaagcaggagcttgtgggcccctaagccagacggggactagcttttggcattatataattaagattttttaaatccttaataagggttttattttatttttatttattttttgagacggagtcttgctctgtggctcaggctggagtacagtggtgcaatcttggctcactgcaacctctgcctcctggctgtgttcaagtggttctgcttcagcctcccaagtagctggggttagagcaccctgtcaccacgccccgctaatttttgtatttctagcagagatgaagtttcactatgttggccaggctgggctcaaactcctgacctcaagtgatctgcccgccttggccccccaaagtgctgtgattacaggcgtgagccgccacgcccagcctaataagggttttaaagataattagtgtgtaggtctgtaggcttatgatggtaaccacaagttgttaatggcattgtgaaaagtttttagttgcgctttatgggtggatgctgaattacattttgatttgatacttataaaaagaaaaagtatttcttcagcttaaaaaattgtttaaaagtttgtgatcatattgtctaccatgtagccagctttcaattatatgtaagagggactttttgacatttacaaataatactttgaggtagatatctgaaagcaccagcacttggaaggtgttcagaagtaacaaattataaaatgagctaacaaacgaaaggcaaaataaaaccgtaaagcaagcagatgggaggcgtgttcagtaacttattcataatgcatctgaaatgattgctgtactcaaatatttaacgttagagtaatagtattttgaatgaaaaccatagttgattgtct

SEQ ID NO: 44 - DNA, 7495 bp, Homo sapiens
gtagggggcgcgcaccgaggcaccgcggcgagcttggctgcttctggggcctgtgtggccctgtgtgtcggaaagatggagcaagaagccgagcccgaggggcggccgcgacccctctgaccgagatcctgctgctttcgcagccaggagcaccgtccctccccggattagtgcgtacgagcgcccagtgccctggcccggagagtggaatgatccccgaggcccagggcgtcgtgcttccgcgcgccccgtgaaggaaactggggagtcttgagggacccccgactccaagcgcgaaaaccccggatggtgaggagcaggcaaatgtgcaataccaacatgtctgtacctactgatggtgctgtaaccacctcacagattccagcttcggaacaagagaccctggttagaccaaagccattgcttttgaagttattaaagtctgttggtgcacaaaaagacacttatactatgaaagaggttcttttttatcttggccagtatattatgactaaacgattatatgatgagaagcaacaacatattgtatattgttcaaatgatcttctaggagatttgtttggcgtgccaagcttctctgtgaaagagcacaggaaaatatataccatgatctacaggaacttggtagtagtcaatcagcaggaatcatcggactcaggtacatctgtgagtgagaacaggtgtcaccttgaaggtgggagtgatcaaaaggaccttgtacaagagcttcaggaagagaaaccttcatcttcacatttggtttctagaccatctacctcatctagaaggagagcaattagtgagacagaagaaaattcagatgaattatctggtgaacgacaaagaaaacgccacaaatctgatagtatttccctttcctttgatgaaagcctggctctgtgtgtaataagggagatatgttgtgaaagaagcagtagcagtgaatctacagggacgccatcgaatccggatcttgatgctggtgtaagtgaacattcaggtgattggttggatcaggattcagtttcagatcagtttagtgtagaatttgaagttgaatctctcgactcagaagattatagccttagtgaagaaggacaagaactctcagatgaagatgatgaggtatatcaagttactgtgtatcaggcaggggagagtgatacagattcatttgaagaagatcctgaaatttccttagctgactattggaaatgcacttcatgcaatgaaatgaatcccccccttccatcacattgcaacagatgttgggcccttcgtgagaattggcttcctgaagataaagggaaagataaaggggaaatctctgagaaagccaaactggaaaactcaacacaagctgaagagggctttgatgttcctgattgtaaaaaaactatagtgaatgattccagagagtcatgtgttgaggaaaatgatgataaaattacacaagcttcacaatcacaagaaagtgaagactattctcagccatcaacttctagtagcattatttatagcagccaagaagatgtgaaagagtttgaaagggaagaaacccaagacaaagaagagagtgtggaatctagtttgccccttaatgccattgaaccttgtgtgatttgtcaaggtcgacctaaaaatggttgcattgtccatggcaaaacaggacatcttatggcctgctttacatgtgcaaagaagctaaagaaaaggaataagccctgcccagtatgtagacaaccaattcaaatgattgtgctaacttatttcccctagttgacctgtctataagagaattatatatttctaactatataaccctaggaatttagacaacctgaaatttattcacatatatcaaagtgagaaaatgcctcaattcacatagatttcttctctttagtataattgacctactttggtagtggaatagtgaatacttactataatttgacttgaatatgtagctcatcctttacaccaactcctaattttaaataatttctactctgtcttaaatgagaagtacttggtttttttttttcttaaatatgtatatgacatttaaatgtaacttattattttttttgagaccgagtcttgctctgttacccaggctggagtgcagtggcgtgatcttggctcactgcaagctctgcctcccgggttcgcaccattctcctgcctcagcctcccaattagcttggcctacagtcatctgccaccacacctggctaattttttgtacttttagtagagacagggtttcaccgtgttagccaggatggtctcgatctcctgacctcgtgatccgcccacctcggcctcccaaagtgctgggattacaggcatgagccaccgcgtccggcctaaatgtcacttagtacctttgatataaagagaaaatgtgtgaaagatttagttttttgtttttttgtttgtttgtttgtttgtttgttttgagatgagtctctctgtcgcccaggctggagtgcagtgtcatgatctagcagtctccgcttcccgggttcaagccattctcctggctcagcctctggagcagctgggattacaggcatgcaccaccatgcccagctaatttttgtatttttagtagagatagggtttcaccatgttggccaggctggtcacgaactcctgacctcaagtgaggtcacccgcctcggcctcccgaagtgctgggattgcagatgtgagccaccatgtccagccaagaattagtatttaaattttagatactctttttttttttttttttttttttttttgagacagagtcttgctccatcacccatgctagagtgcagtggagtgatctcggctcactgcaacttccgccttctgggttcaagctattctcctgcctcagccttccaagtaactgggattacaggcatgtaccaccataccagctgatttttttgtatttttagtaaagacagggtttcaccatgttagccaggctgatcttgaactcctaaactcaagtgatctactcacctcagcctcccaaaatgctgggattacagatgtgaggcacctggcctcagatttttgatactcttaaaccttctgatccttagtttctctctccaaaatactctttctaggttaaaaaaaaaaaggctcttatatttggtgctatgtaaatgaaaatgttttttaggttttcttgatttaacaatagagacagggtctccctgtgttgcccaggctggtctcgaactcctgggctcaagagatcctcctgtcttggcctcgcaaagtgctaagtaggattacaggcgttagccaccacacccggctgtaaaaatgtacttattctccagcctcttttgtataaaccatagtaagggatgggagtaatgatgttatctgtgaaaatagccaccatttacccgtaagacaaaacttgttaaagcctcctgagtctaacctagattacatcaggccctttttcacacacaaaaaaatcctttatgggatttaatggaatctgttgtttccccctaagttgaaaaacaactctaagacactttaaagtaccttcttggcctgggttacatggttcccagcctaggtttcagacttttgcttaaggccagttttagaaacccgtgaattcagaaaagttaattcagaaatttgataaacagaattgttatttaaaaactaactggaaagattgttaagttctttctgaattattcagaaattatgcatcattttccttcaagaatgacagggtcagcatgtggaattccaagatacctcttgacttcctctcaagctccgtgtttggtcagtggaggcccatccgagctcagcactgagaagtgttagtttctttgggacccatctaccctgaccacatcatgatgttcatctgcagctgttgcaaggtgttcagattgtataaacataaatgtcacaaaaactttaaaagaagtgcaattctcaaaaggttaggtggactaaagcattctgtaaagcaactgctaataatgagcttacagtggatttgaatttgaaaaatatagtaacaagcctgtcaaatatctgcaagaactatggaataaaactactgatgcagtgaagacagttgaaaagatcaaacaaatgccaagctatatttataatgaacaaattcaagaaaaaggactacggaaagttcaggacatcaaagaagtcaggcaaaactcatcttgacccctgttgcaggcaaaggaacgcagctggaagaaaagatgatataacagttaacaggatgcagacatggcagaggtttcctaaaaatctcattatctataaccatttctatatttacatttgaaaatctcctttggagacttagaacctctaaattattgacttattttttatataaggtcactccgatgaaaggtgattacaaaatcatctacattgctgtctacaaaacagataatatggatgtttgatcgcatctcattgttaactctttactgatatgtttgtaaatacagaagtgaaatgtggacataaaatagttacgctatttggttaatggtactagacaacatgtaattaatgacattcaaaaatttatggctagtgatatatataaagtaaaattttctttgcagtaaaatatgccctttattatagaagggaggatataaggaaccaacagtttgtatgaaaatagctcaaataatatcttttattttgattttaatatttcttattttggtttattagtgtcttagaacaaaatggccttatataatgaagcctagttatgctggactgttttgatctcttttaattgttctgacagatagttggggatgagagccgaataaggtttgcctgaaataactgacactatataatttctgctttggcaaatactaagttctaacttgtcattcctggtagaacaagctttatttttcgagcctagcaatgatctagaagcagatgttatctcagtgccttttgcaatttgttgtgtgggtttttttttttttaaagccacacaataattttggaaaacaatgtatgggtagaacatgtgtctgttaattgcacacaaaaccacttttaatgggtacagagttaaatttgaaggaataagttctagctgaagtattatgaactccaaataatgctttgaggacctccaaaggtaaaagtactaatccctttggccatttattgagagagagagagagagagagtagggtgactatagttaatgtattgaatgttcttgctacaaataaatgatatttgagctgatgggtgtgctaattacactgatttgatcaatacccattgtatgtgaaacagtacatacaccatatttacaattatgtatttaacatttaaaatttctaatataagtatctctcaaactgtggattaacttcttgatttatatttaaatatgaatcttaagcaaaacagtgaaaataaccatcttgatttagtgtttttctcccatatgtgaattgtatatacttaggtgaagacaataaaatcaactgaactgtaagcttagaataggactgaggtaattctgcacagcaactttactaatggtacattgttgcttcaaaactctctctctctctctctgtctgtctcaataaatggccaaagggattagtagtttacctgtggaggtcctccaagcattatttggagttgataatacttcagctacaaccaagcagaatctcttttttttggaggtcctcgaagcattatttggagttgataatacttcagcttcaatttggagttgataatatttcagctagaacctagtagaatctgtttttttcctttggaggtcctcaaagcattattggagttcataatactgaagctagaaccaagcagaatctgtttttttctgaggagtatcggtagcataaatgtgattataaacatagtacacttgatatatggaggcagtgacagctatttttacaaaatttaaatctgcaaatggattcaacatgtttatgggttattaaaattgtctgatttcttaggttctttatagtacacgtgttgaaaataaatgattaagaattgtttcaagaatgcaattatttgatcttaaatttttatgagttgttaaaatagaaattatttgaatatcatatatttgggtaacaaaaggcacaagtctgaatgtgtttctttttctggaatggccatgcctgcccactttagaaatacaaatatcactgggcagcttgaagcagttgggagcctccaatgagagcaacttgagagaatgatgttgcaagttagtaggagtaagaaatgctgtgttctccctgtcttctcttaggtcacatggcagcctggcctaagtgatcgtgaatggtctataagggaggtagctgggacagggaggggagtttgggctagccaccgtaccacttgtcagcgtgaaaagtaagattgtaattgcctgtttagttttctgcctcatctttgaaagttccaccaagctgggaacctcttgattgtgaggcacaaatgtaagtacatcagaaaaaaacaaaaaaactggctttaaagcaggagcttgtgggcccctaagccagacggggactagcttttggcattatataattaagattttttaaatccttaataagggttttattttatttttatttattttttgagacggagtcttgctctgtggctcaggctggagtacagtggtgcaatcttggctcactgcaacctctgcctcctggctgtgttcaagtggttctgcttcagcctcccaagtagctggggttagagcaccctgtcaccacgccccgctaatttttgtatttctagcagagatgaagtttcactatgttggccaggctgggctcaaactcctgacctcaagtgatctgcccgccttggccccccaaagtgctgtgattacaggcgtgagccgccacgcccagcctaataagggttttaaagataattagtgtgtaggtctgtaggcttatgatggtaaccacaagttgttaatggcattgtgaaaagtttttagttgcgctttatgggtggatgctgaattacattttgatttgatacttataaaaagaaaaagtatttcttcagcttaaaaaattgtttaaaagtttgtgatcatattgtctaccatgtagccagctttcaattatatgtaagagggactttttgacatttacaaataatactttgaggtagatatctgaaagcaccagcacttggaaggtgttcagaagtaacaaattataaaatgagctaacaaacgaaaggcaaaataaaaccgtaaagcaagcagatgggaggcgtgttcagtaacttattcataatgcatctgaaatgattgctgtactcaaatatttaacgttagagtaatagtattttgaatgaaaaccatagttgattgtct

SEQ ID NO: 45 - DNA, 888 bp, Homo sapiens
ataccttagaccctcagtcatgccagtgcctgctctgtgcctgctctgggccctggcaatggtgacccggcctgcctcagcggcccccatgggcggcccagaactggcacagcatgaggagctgaccctgctcttccatgggaccctgcagctgggccaggccctcaacggtgtgtacaggaccacggagggacggctgacaaaggccaggaacagcctgggtctctatggccgcacaatagaactcctggggcaggaggtcagccggggccgggatgcagcccaggaacttcgggcaagcctgttggagactcagatggaggaggatattctgcagctgcaggcagaggccacagctgaggtgctgggggaggtggcccaggcacagaaggtgctacgggacagcgtgcagcggctagaagtccagctgaggagcgcctggctgggccctgcctaccgagaatttgaggtcttaaaggctcacgctgacaagcagagccacatcctatgggccctcacaggccacgtgcagcggcagaggcgggagatggtggcacagcagcatcggctgcgacagatccaggagagactccacacagcggcgctcccagcctgaatctgcctggatggaactgaggaccaatcatgctgcaaggaacacttccacgccccgtgaggcccctgtgcagggaggagctgcctgttcactgggatcagccagggcgccgggccccacttctgagcacagagcagagacagacgcaggcggggacaaaggcagaggatgtagccccattggggaggggtggaggaaggacatgtaccctttcatgcctacacacccctcattaaagcagagtcgtggcatctcaaaaaaaaaaaaaaaaa

SEQ ID NO: 46 - DNA, 3078 bp, Homo sapiens
gtcagtcccatggggaatgtcaacaggcaggggcagcactgcagagatttcatcatggtctcccaggccctcaggctcctctgccttctgcttgggcttcagggctgcctggctgcagtcttcgtaacccaggaggaagcccacggcgtcctgcaccggcgccggcgcgccaacgcgttcctggaggagctgcggccgggctccctggagagggagtgcaaggaggagcagtgctccttcgaggaggcccgggagatcttcaaggacgcggagaggacgaagctgttctggatttcttacagtgatggggaccagtgtgcctcaagtccatgccagaatgggggctcctgcaaggaccagctccagtcctatatctgcttctgcctccctgccttcgagggccggaactgtgagacgcacaaggatgaccagctgatctgtgtgaacgagaacggcggctgtgagcagtactgcagtgaccacacgggcaccaagcgctcctgtcggtgccacgaggggtactctctgctggcagacggggtgtcctgcacacccacagttgaatatccatgtggaaaaatacctattctagaaaaaagaaatgccagcaaaccccaaggccgaattgtggggggcaaggtgtgccccaaaggggagtgtccatggcaggtcctgttgttggtgaatggagctcagttgtgtggggggaccctgatcaacaccatctgggtggtctccgcggcccactgtttcgacaaaatcaagaactggaggaacctgatcgcggtgctgggcgagcacgacctcagcgagcacgacggggatgagcagagccggcgggtggcgcaggtcatcatccccagcacgtacgtcccgggcaccaccaaccacgacatcgcgctgctccgcctgcaccagcccgtggtcctcactgaccatgtggtgcccctctgcctgcccgaacggacgttctctgagaggacgctggccttcgtgcgcttctcattggtcagcggctggggccagctgctggaccgtggcgccacggccctggagctcatggtcctcaacgtgccccggctgatgacccaggactgcctgcagcagtcacggaaggtgggagactccccaaatatcacggagtacatgttctgtgccggctactcggatggcagcaaggactcctgcaagggggacagtggaggcccacatgccacccactaccggggcacgtggtacctgacgggcatcgtcagctggggccagggctgcgcaaccgtgggccactttggggtgtacaccagggtctcccagtacatcgagtggctgcaaaagctcatgcgctcagagccacgcccaggagtcctcctgcgagccccatttccctagcccagcagccctggcctgtggagagaaagccaaggctgcgtcgaactgtcctggcaccaaatcccatatattcttctgcagttaatggggtagaggagggcatgggagggagggagaggtggggagggagacagagacagaaacagagagagacagagacagagagagactgagggagagactctgaggacatggagagagactcaaagagactccaagattcaaagagactaatagagacacagagatggaatagaaaagatgagaggcagaggcagacaggcgctggacagaggggcaggggagtgccaaggttgtcctggaggcagacagcccagctgagcctccttacctcccttcagccaagcccacctgcacgtgatctgctggcctcaggctgctgctctgccttcattgctggagacagtagaggcatgaacacacatggatgcacacacacacacgccaatgcacacacacagagatatgcacacacacggatgcacacacagatggtcacacagagatacgcaaacacaccgatgcacacgcacatagagatatgcacacacagatgcacacacagatatacacatggatgcacgcacatgccaatgcacgcacacatcagtgcacacggatgcacagagatatgcacacaccgatgtgcgcacacacagatatgcacacacatggatgagcacacacacaccaatgcgcacacacaccgatgtacacacacagatgcacacacagatgcacacacaccgatgctgactccatgtgtgctgtcctctgaaggcggttgtttagctctcacttttctggttcttatccattatcatcttcacttcagacaattcagaagcatcaccatgcatggtggcgaatgcccccaaactctcccccaaatgtatttctcccttcgctgggtgccgggctgcacagactattccccacctgcttcccagcttcacaataaacggctgcgtctcctccgcacacctgtggtgcctgccacccactgggttgcccatgattcatttttggagcccccggtgctcatcctctgagatgctcttttctttcacaattttcaacatcactgaaatgaaccctcacatggaagctattttttaaaaacaaaagctgtttgatagatgtttgaggctgtagctcccaggatcctgtggaattggatgttctctccctgccacagcccttgtcaatgatatttcacagagaccctgggagcacctgctcaagagtcagggacacacgcatcactaaatgcaagttcccaggccctggctgcagtgggaggacctggcaagctgcactcttgctgagtccccagggtggtggaagaagaatgagaaacacatgaacagagaaatggggaggtgacaaacagtgcccccactcagactccggcaagcacggctcagagagtggactcgatgccatccctgcagggccgtcctgggcaccactggcactcacagcagcaaggtgggcaccattggcactcacagcagcaaggcaggcaccagcaacccacctcgggggcactcaggcatcatctacttcagagcagacagggtctatgaactacagccgtgggctgcttccaaggcaccctgctcttgtaaataaagttttatgggaacacaaaaaaaaaaaaaaaaa

SEQ ID NO: 47 - DNA, 9048 bp, Homo sapiens
gcttagtgctgagcacatccagtgggtaaagttccttaaaatgctctgcaaagaaattgggacttttcattaaatcagaaattttacttttttcccctcctgggagctaaagatattttagagaagaattaaccttttgcttctccagttgaacatttgtagcaataagtcatgcaaatagagctctccacctgcttctttctgtgccttttgcgattctgctttagtgccaccagaagatactacctgggtgcagtggaactgtcatgggactatatgcaaagtgatctcggtgagctgcctgtggacgcaagatttcctcctagagtgccaaaatcttttccattcaacacctcagtcgtgtacaaaaagactctgtttgtagaattcacggatcaccttttcaacatcgctaagccaaggccaccctggatgggtctgctaggtcctaccatccaggctgaggtttatgatacagtggtcattacacttaagaacatggcttcccatcctgtcagtcttcatgctgttggtgtatcctactggaaagcttctgagggagctgaatatgatgatcagaccagtcaaagggagaaagaagatgataaagtcttccctggtggaagccatacatatgtctggcaggtcctgaaagagaatggtccaatggcctctgacccactgtgccttacctactcatatctttctcatgtggacctggtaaaagacttgaattcaggcctcattggagccctactagtatgtagagaagggagtctggccaaggaaaagacacagaccttgcacaaatttatactactttttgctgtatttgatgaagggaaaagttggcactcagaaacaaagaactccttgatgcaggatagggatgctgcatctgctcgggcctggcctaaaatgcacacagtcaatggttatgtaaacaggtctctgccaggtctgattggatgccacaggaaatcagtctattggcatgtgattggaatgggcaccactcctgaagtgcactcaatattcctcgaaggtcacacatttcttgtgaggaaccatcgccaggcgtccttggaaatctcgccaataactttccttactgctcaaacactcttgatggaccttggacagtttctactgttttgtcatatctcttcccaccaacatgatggcatggaagcttatgtcaaagtagacagctgtccagaggaaccccaactacgaatgaaaaataatgaagaagcggaagactatgatgatgatcttactgattctgaaatggatgtggtcaggtttgatgatgacaactctccttcctttatccaaattcgctcagttgccaagaagcatcctaaaacttgggtacattacattgctgctgaagaggaggactgggactatgctcccttagtcctcgcccccgatgacagaagttataaaagtcaatatttgaacaatggccctcagcggattggtaggaagtacaaaaaagtccgatttatggcatacacagatgaaacctttaagactcgtgaagctattcagcatgaatcaggaatcttgggacctttactttatggggaagttggagacacactgttgattatatttaagaatcaagcaagcagaccatataacatctaccctcacggaatcactgatgtccgtcctttgtattcaaggagattaccaaaaggtgtaaaacatttgaaggattttccaattctgccaggagaaatattcaaatataaatggacagtgactgtagaagatgggccaactaaatcagatcctcggtgcctgacccgctattactctagtttcgttaatatggagagagatctagcttcaggactcattggccctctcctcatctgctacaaagaatctgtagatcaaagaggaaaccagataatgtcagacaagaggaatgtcatcctgttttctgtatttgatgagaaccgaagctggtacctcacagagaatatacaacgctttctccccaatccagctggagtgcagcttgaggatccagagttccaagcctccaacatcatgcacagcatcaatggctatgtttttgatagtttgcagttgtcagtttgtttgcatgaggtggcatactggtacattctaagcattggagcacagactgacttcctttctgtcttcttctctggatataccttcaaacacaaaatggtctatgaagacacactcaccctattcccattctcaggagaaactgtcttcatgtcgatggaaaacccaggtctatggattctggggtgccacaactcagactttcggaacagaggcatgaccgccttactgaaggtttctagttgtgacaagaacactggtgattattacgaggacagttatgaagatatttcagcatacttgctgagtaaaaacaatgccattgaaccaagaagcttctcccagaattcaagacaccctagcactaggcaaaagcaatttaatgccaccacaattccagaaaatgacatagagaagactgacccttggtttgcacacagaacacctatgcctaaaatacaaaatgtctcctctagtgatttgttgatgctcttgcgacagagtcctactccacatgggctatccttatctgatctccaagaagccaaatatgagactttttctgatgatccatcacctggagcaatagacagtaataacagcctgtctgaaatgacacacttcaggccacagctccatcacagtggggacatggtatttacccctgagtcaggcctccaattaagattaaatgagaaactggggacaactgcagcaacagagttgaagaaacttgatttcaaagtttctagtacatcaaataatctgatttcaacaattccatcagacaatttggcagcaggtactgataatacaagttccttaggacccccaagtatgccagttcattatgatagtcaattagataccactctatttggcaaaaagtcatctccccttactgagtctggtggacctctgagcttgagtgaagaaaataatgattcaaagttgttagaatcaggtttaatgaatagccaagaaagttcatggggaaaaaatgtatcgtcaacagagagtggtaggttatttaaagggaaaagagctcatggacctgctttgttgactaaagataatgccttattcaaagttagcatctctttgttaaagacaaacaaaacttccaataattcagcaactaatagaaagactcacattgatggcccatcattattaattgagaatagtccatcagtctggcaaaatatattagaaagtgacactgagtttaaaaaagtgacacctttgattcatgacagaatgcttatggacaaaaatgctacagctttgaggctaaatcatatgtcaaataaaactacttcatcaaaaaacatggaaatggtccaacagaaaaaagagggccccattccaccagatgcacaaaatccagatatgtcgttctttaagatgctattcttgccagaatcagcaaggtggatacaaaggactcatggaaagaactctctgaactctgggcaaggccccagtccaaagcaattagtatccttaggaccagaaaaatctgtggaaggtcagaatttcttgtctgagaaaaacaaagtggtagtaggaaagggtgaatttacaaaggacgtaggactcaaagagatggtttttccaagcagcagaaacctatttcttactaacttggataatttacatgaaaataatacacacaatcaagaaaaaaaaattcaggaagaaatagaaaagaaggaaacattaatccaagagaatgtagttttgcctcagatacatacagtgactggcactaagaatttcatgaagaaccttttcttactgagcactaggcaaaatgtagaaggttcatatgacggggcatatgctccagtacttcaagattttaggtcattaaatgattcaacaaatagaacaaagaaacacacagctcatttctcaaaaaaaggggaggaagaaaacttggaaggcttgggaaatcaaaccaagcaaattgtagagaaatatgcatgcaccacaaggatatctcctaatacaagccagcagaattttgtcacgcaacgtagtaagagagctttgaaacaattcagactcccactagaagaaacagaacttgaaaaaaggataattgtggatgacacctcaacccagtggtccaaaaacatgaaacatttgaccccgagcaccctcacacagatagactacaatgagaaggagaaaggggccattactcagtctcccttatcagattgccttacgaggagtcatagcatccctcaagcaaatagatctccattacccattgcaaaggtatcatcatttccatctattagacctatatatctgaccagggtcctattccaagacaactcttctcatcttccagcagcatcttatagaaagaaagattctggggtccaagaaagcagtcatttcttacaaggagccaaaaaaaataacctttctttagccattctaaccttggagatgactggtgatcaaagagaggttggctccctggggacaagtgccacaaattcagtcacatacaagaaagttgagaacactgttctcccgaaaccagacttgcccaaaacatctggcaaagttgaattgcttccaaaagttcacatttatcagaaggacctattccctacggaaactagcaatgggtctcctggccatctggatctcgtggaagggagccttcttcagggaacagagggagcgattaagtggaatgaagcaaacagacctggaaaagttccctttctgagagtagcaacagaaagctctgcaaagactccctccaagctattggatcctcttgcttgggataaccactatggtactcagataccaaaagaagagtggaaatcccaagagaagtcaccagaaaaaacagcttttaagaaaaaggataccattttgtccctgaacgcttgtgaaagcaatcatgcaatagcagcaataaatgagggacaaaataagcccgaaatagaagtcacctgggcaaagcaaggtaggactgaaaggctgtgctctcaaaacccaccagtcttgaaacgccatcaacgggaaataactcgtactactcttcagtcagatcaagaggaaattgactatgatgataccatatcagttgaaatgaagaaggaagattttgacatttatgatgaggatgaaaatcagagcccccgcagctttcaaaagaaaacacgacactattttattgctgcagtggagaggctctgggattatgggatgagtagctccccacatgttctaagaaacagggctcagagtggcagtgtccctcagttcaagaaagttgttttccaggaatttactgatggctcctttactcagcccttataccgtggagaactaaatgaacatttgggactcctggggccatatataagagcagaagttgaagataatatcatggtaactttcagaaatcaggcctctcgtccctattccttctattctagccttatttcttatgaggaagatcagaggcaaggagcagaacctagaaaaaactttgtcaagcctaatgaaaccaaaacttacttttggaaagtgcaacatcatatggcacccactaaagatgagtttgactgcaaagcctgggcttatttctctgatgttgacctggaaaaagatgtgcactcaggcctgattggaccccttctggtctgccacactaacacactgaaccctgctcatgggagacaagtgacagtacaggaatttgctctgtttttcaccatctttgatgagaccaaaagctggtacttcactgaaaatatggaaagaaactgcagggctccctgcaatatccagatggaagatcccacttttaaagagaattatcgcttccatgcaatcaatggctacataatggatacactacctggcttagtaatggctcaggatcaaaggattcgatggtatctgctcagcatgggcagcaatgaaaacatccattctattcatttcagtggacatgtgttcactgtacgaaaaaaagaggagtataaaatggcactgtacaatctctatccaggtgtttttgagacagtggaaatgttaccatccaaagctggaatttggcgggtggaatgccttattggcgagcatctacatgctgggatgagcacactttttctggtgtacagcaataagtgtcagactcccctgggaatggcttctggacacattagagattttcagattacagcttcaggacaatatggacagtgggccccaaagctggccagacttcattattccggatcaatcaatgcctggagcaccaaggagcccttttcttggatcaaggtggatctgttggcaccaatgattattcacggcatcaagacccagggtgcccgtcagaagttctccagcctctacatctctcagtttatcatcatgtatagtcttgatgggaagaagtggcagacttatcgaggaaattccactggaaccttaatggtcttctttggcaatgtggattcatctgggataaaacacaatatttttaaccctccaattattgctcgatacatccgtttgcacccaactcattatagcattcgcagcactcttcgcatggagttgatgggctgtgatttaaatagttgcagcatgccattgggaatggagagtaaagcaatatcagatgcacagattactgcttcatcctactttaccaatatgtttgccacctggtctccttcaaaagctcgacttcacctccaagggaggagtaatgcctggagacctcaggtgaataatccaaaagagtggctgcaagtggacttccagaagacaatgaaagtcacaggagtaactactcagggagtaaaatctctgcttaccagcatgtatgtgaaggagttcctcatctccagcagtcaagatggccatcagtggactctcttttttcagaatggcaaagtaaaggtttttcagggaaatcaagactccttcacacctgtggtgaactctctagacccaccgttactgactcgctaccttcgaattcacccccagagttgggtgcaccagattgccctgaggatggaggttctgggctgcgaggcacaggacctctactgagggtggccactgcagcacctgccactgccgtcacctctccctcctcagctccagggcagtgtccctccctggcttgccttctacctttgtgctaaatcctagcagacactgccttgaagcctcctgaattaactatcatcagtcctgcatttctttggtggggggccaggagggtgcatccaatttaacttaactcttacctattttctgcagctgctcccagattactccttccttccaatataactaggcaaaaagaagtgaggagaaacctgcatgaaagcattcttccctgaaaagttaggcctctcagagtcaccacttcctctgttgtagaaaaactatgtgatgaaactttgaaaaagatatttatgatgttaacatttcaggttaagcctcatacgtttaaaataaaactctcagttgtttattatcctgatcaagcatggaacaaagcatgtttcaggatcagatcaatacaatcttggagtcaaaaggcaaatcatttggacaatctgcaaaatggagagaatacaataactactacagtaaagtctgtttctgcttccttacacatagatataattatgttatttagtcattatgaggggcacattcttatctccaaaactagcattcttaaactgagaattatagatggggttcaagaatccctaagtcccctgaaattatataaggcattctgtataaatgcaaatgtgcatttttctgacgagtgtccatagatataaagccatttggtcttaattctgaccaataaaaaaataagtcaggaggatgcaattgttgaaagctttgaaataaaataacaatgtcttcttgaaatttgtgatggccaagaaagaaaatgatgatgacattaggcttctaaaggacatacatttaatatttctgtggaaatatgaggaaaatccatggttatctgagataggagatacaaactttgtaattctaataatgcactcagtttactctctccctctactaatttcctgctgaaaataacacaacaaaaatgtaacaggggaaattatataccgtgactgaaaactagagtcctacttacatagttgaaatatcaaggaggtcagaagaaaattggactggtgaaaacagaaaaaacactccagtctgccatatcaccacacaataggatcccccttcttgccctccacccccataagattgtgaagggtttactgctccttccatctgcctgaccccttcactatgactacacagaatctcctgatagtaaagggggctggaggcaaggataagttatagagcagttggaggaagcatccaaagattgcaacccagggcaaatggaaaacaggagatcctaatatgaaagaaaaatggatcccaatctgagaaaaggcaaaagaatggctacttttttctatgctggagtattttctaataatcctgcttgacccttatctgacctctttggaaactataacatagctgtcacagtatagtcacaatccacaaatgatgcaggtgcaaatggtttatagccctgtgaagttcttaaagtttagaggctaacttacagaaatgaataagttgttttgttttatagcccggtagaggagttaaccccaaaggtgatatggttttatttcctgttatgtttaacttgataatcttattttggcattcttttcccattgactatatacatctctatttctcaaatgttcatggaactagctcttttattttcctgctggtttcttcagtaatgagttaaataaaacattgacacatacaaacaaaaaaaaaaaaaaa

SEQ ID NO: 48 - DNA, 2617 bp, Homo sapiens
gcgtccccctcggcgggctgccgccgtgcccgcgccggctccccagcccgagcctgccccttgccctgatgaggtgcaaagagcgggatcggaggcggggcctggccgggctgtgagcggcgtatgcaaatcgagggtctcggggatgcggatccaagaccctgggaaggtcttctttggcaatgtggattcatctgggataaaacacaatatttttaaccctccaattattgctcgatacatccgtttgcacccaactcattatagcattcgcagcactcttcgcatggagttgatgggctgtgatttaaatagttgcagcatgccattgggaatggagagtaaagcaatatcagatgcacagattactgcttcatcctactttaccaatatgtttgccacctggtctccttcaaaagctcgacttcacctccaagggaggagtaatgcctggagacctcaggtgaataatccaaaagagtggctgcaagtggacttccagaagacaatgaaagtcacaggagtaactactcagggagtaaaatctctgcttaccagcatgtatgtgaaggagttcctcatctccagcagtcaagatggccatcagtggactctcttttttcagaatggcaaagtaaaggtttttcagggaaatcaagactccttcacacctgtggtgaactctctagacccaccgttactgactcgctaccttcgaattcacccccagagttgggtgcaccagattgccctgaggatggaggttctgggctgcgaggcacaggacctctactgagggtggccactgcagcacctgccactgccgtcacctctccctcctcagctccagggcagtgtccctccctggcttgccttctacctttgtgctaaatcctagcagacactgccttgaagcctcctgaattaactatcatcagtcctgcatttctttggtggggggccaggagggtgcatccaatttaacttaactcttacctattttctgcagctgctcccagattactccttccttccaatataactaggcaaaaagaagtgaggagaaacctgcatgaaagcattcttccctgaaaagttaggcctctcagagtcaccacttcctctgttgtagaaaaactatgtgatgaaactttgaaaaagatatttatgatgttaacatttcaggttaagcctcatacgtttaaaataaaactctcagttgtttattatcctgatcaagcatggaacaaagcatgtttcaggatcagatcaatacaatcttggagtcaaaaggcaaatcatttggacaatctgcaaaatggagagaatacaataactactacagtaaagtctgtttctgcttccttacacatagatataattatgttatttagtcattatgaggggcacattcttatctccaaaactagcattcttaaactgagaattatagatggggttcaagaatccctaagtcccctgaaattatataaggcattctgtataaatgcaaatgtgcatttttctgacgagtgtccatagatataaagccatttggtcttaattctgaccaataaaaaaataagtcaggaggatgcaattgttgaaagctttgaaataaaataacaatgtcttcttgaaatttgtgatggccaagaaagaaaatgatgatgacattaggcttctaaaggacatacatttaatatttctgtggaaatatgaggaaaatccatggttatctgagataggagatacaaactttgtaattctaataatgcactcagtttactctctccctctactaatttcctgctgaaaataacacaacaaaaatgtaacaggggaaattatataccgtgactgaaaactagagtcctacttacatagttgaaatatcaaggaggtcagaagaaaattggactggtgaaaacagaaaaaacactccagtctgccatatcaccacacaataggatcccccttcttgccctccacccccataagattgtgaagggtttactgctccttccatctgcctgaccccttcactatgactacacagaatctcctgatagtaaagggggctggaggcaaggataagttatagagcagttggaggaagcatccaaagattgcaacccagggcaaatggaaaacaggagatcctaatatgaaagaaaaatggatcccaatctgagaaaaggcaaaagaatggctacttttttctatgctggagtattttctaataatcctgcttgacccttatctgacctctttggaaactataacatagctgtcacagtatagtcacaatccacaaatgatgcaggtgcaaatggtttatagccctgtgaagttcttaaagtttagaggctaacttacagaaatgaataagttgttttgttttatagcccggtagaggagttaaccccaaaggtgatatggttttatttcctgttatgtttaacttgataatcttattttggcattcttttcccattgactatatacatctctatttctcaaatgttcatggaactagctcttttattttcctgctggtttcttcagtaatgagttaaataaaacattgacacatacaaacaaaaaaaaaaaaaaa

SEQ ID NO: 49 - protein, 3677 aa, Homo sapiens
MEDEREDVQKKTFTKWVNAQFSKFGKQHIENLFSDLQDGRRLLDLLEGLTGQKLPKEKGSTRVHALNNVNKALRVLQNNNVDLVNIGSTDIVDGNHKLTLGLIWNIILHWQVKNVMKNIMAGLQQTNSEKILLSWVRQSTRNYPQVNVINFTTSWSDGLALNALIHSHRPDLFDWNSVVCQQSATQRLEHAFNIARYQLGIEKLLDPEDVDTTYPDKKSILMYITSLFQVLPQQVSIEAIQEVEMLPRPPKVTKEEHFQLHHQMHYSQQITVSLAQGYERTSSPKPRFKSYAYTQAAYVTTSDPTRSPFPSQHLEAPEDKSFGSSLMESEVNLDRYQTALEEVLSWLLSAEDTLQAQGEISNDVEVVKDQFHTHEGYMMDLTAHQGRVGNILQLGSKLIGTGKLSEDEETEVQEQMNLLNSRWECLRVASMEKQSNLHRVLMDLQNQKLKELNDWLTKTEERTRKMEEEPLGPDLEDLKRQVQQHKVLQEDLEQEQVRVNSLTHMVVVVDESSGDHATAALEEQLKVLGDRWANICRWTEDRWVLLQDILLKWQRLTEEQCLFSAWLSEKEDAVNKIHTTGFKDQNEMLSSLQKLAVLKADLEKKKQSMGKLYSLKQDLLSTLKNKSVTQKTEAWLDNFARCWDNLVQKLEKSTAQISQAVTTTQPSLTQTTVMETVTTVTTREQILVKHAQEELPPPPPQKKRQITVDSEIRKRLDVDITELHSWITRSEAVLQSPEFAIFRKEGNFSDLKEKVNAIEREKAEKFRKLQDASRSAQALVEQMVNEGVNADSIKQASEQLNSRWIEFCQLLSERLNWLEYQNNIIAFYNQLQQLEQMTTTAENWLKIQPTTPSEPTAIKSQLKICKDEVNRLSGLQPQIERLKIQSIALKEKGQGPMFLDADFVAFTNHFKQVFSDVQAREKELQTIFDTLPPMRYQETMSAIRTWVQQSETKLSIPQLSVTDYEIMEQRLGELQALQSSLQEQQSGLYYLSTTVKEMSKKAPSEISRKYQSEFEEIEGRWKKLSSQLVEHCQKLEEQMNKLRKIQNHIQTLKKWMAEVDVFLKEEWPALGDSEILKKQLKQCRLLVSDIQTIQPSLNSVNEGGQKIKNEAEPEFASRLETELKELNTQWDHMCQQVYARKEALKGGLEKTVSLQKDLSEMHEWMTQAEEEYLERDFEYKTPDELQKAVEEMKRAKEEAQQKEAKVKLLTESVNSVIAQAPPVAQEALKKELETLTTNYQWLCTRLNGKCKTLEEVWACWHELLSYLEKANKWLNEVEFKLKTTENIPGGAEEISEVLDSLENLMRHSEDNPNQIRILAQTLTDGGVMDELINEELETFNSRWRELHEEAVRRQKLLEQSIQSAQETEKSLHLIQESLTFIDKQLAAYIADKVDAAQMPQEAQKIQSDLTSHEISLEEMKKHNQGKEAAQRVLSQIDVAQKKLQDVSMKFRLFQKPANFEQRLQESKMILDEVKMHLPALETKSVEQEVVQSQLNHCVNLYKSLSEVKSEVEMVIKTGRQIVQKKQTENPKELDERVTALKLHYNELGAKVTERKQQLEKCLKLSRKMRKEMNVLTEWLAATDMELTKRSAVEGMPSNLDSEVAWGKATQKEIEKQKVHLKSITEVGEALKTVLGKKETLVEDKLSLLNSNWIAVTSRAEEWLNLLLEYQKHMETFDQNVDHITKWIIQADTLLDESEKKKPQQKEDVLKRLKAELNDIRPKVDSTRDQAANLMANRGDHCRKLVEPQISELNHRFAAISHRIKTGKASIPLKELEQFNSDIQKLLEPLEAEIQQGVNLKEEDFNKDMNEDNEGTVKELLQRGDNLQQRITDERKREEIKIKQQLLQTKHNALKDLRSQRRKKALEISHQWYQYKRQADDLLKCLDDIEKKLASLPEPRDERKIKEIDRELQKKKEELNAVRRQAEGLSEDGAAMAVEPTQIQLSKRWREIESKFAQFRRLNFAQIHTVREETMMVMTEDMPLEISYVPSTYLTEITHVSQALLEVEQLLNAPDLCAKDFEDLFKQEESLKNIKDSLQQSSGRIDIIHSKKTAALQSATPVERVKLQEALSQLDFQWEKVNKMYKDRQGRFDRSVEKWRRFHYDIKIFNQWLTEAEQFLRKTQIPENWEHAKYKWYLKELQDGIGQRQTVVRTLNATGEEIIQQSSKTDASILQEKLGSLNLRWQEVCKQLSDRKKRLEEQKNILSEFQRDLNEFVLWLEEADNIASIPLEPGKEQQLKEKLEQVKLLVEELPLRQGILKQLNETGGPVLVSAPISPEEQDKLENKLKQTNLQWIKVSRALPEKQGEIEAQIKDLGQLEKKLEDLEEQLNHLLLWLSPIRNQLEIYNQPNQEGPFDVQETEIAVQAKQPDVEEILSKGQHLYKEKPATQPVKRKLEDLSSEWKAVNRLLQELRAKQPDLAPGLTTIGASPTQTVTLVTQPVVTKETAISKLEMPSSLMLEVPALADFNRAWTELTDWLSLLDQVIKSQRVMVGDLEDINEMIIKQKATMQDLEQRRPQLEELITAAQNLKNKTSNQEARTIITDRIERIQNQWDEVQEHLQNRRQQLNEMLKDSTQWLEAKEEAEQVLGQARAKLESWKEGPYTVDAIQKKITETKQLAKDLRQWQTNVDVANDLALKLLRDYSADDTRKVHMITENINASWRSIHKRVSEREAALEETHRLLQQFPLDLEKFLAWLTEAETTANVLQDATRKERLLEDSKGVKELMKQWQDLQGEIEAHTDVYHNLDENSQKILRSLEGSDDAVLLQRRLDNMNFKWSELRKKSLNIRSHLEASSDQWKRLHLSLQELLVWLQLKDDELSRQAPIGGDFPAVQKQNDVHRAFKRELKTKEPVIMSTLETVRIFLTEQPLEGLEKLYQEPRELPPEERAQNVTRLLRKQAEEVNTEWEKLNLHSADWQRKIDETLERLQELQEATDELDLKLRQAEVIKGSWQPVGDLLIDSLQDHLEKVKALRGEIAPLKENVSHVNDLARQLTTLGIQLSPYNLSTLEDLNTRWKLLQVAVEDRVRQLHEAHRDFGPASQHFLSTSVQGPWERAISPNKVPYYINHETQTTCWDHPKMTELYQSLADLNNVRFSAYRTAMKLRRLQKALCLDLLSLSAACDALDQHNLKQNDQPMDILQIINCLTTIYDRLEQEHNNLVNVPLCVDMCLNWLLNVYDTGRTGRIRVLSFKTGIISLCKAHLEDKYRYLFKQVASSTGFCDQRRLGLLLHDSIQIPRQLGEVASFGGSNIEPSVRSCFQFANNKPEIEAALFLDWMRLEPQSMVWLPVLHRVAAAETAKHQAKCNICKECPIIGFRYRSLKHFNYDICQSCFFSGRVAKGHKMHYPMVEYCTPTTSGEDVRDFAKVLKNKFRTKRYFAKHPRMGYLPVQTVLEGDNMETPVTLINFWPVDSAPASSPQLSHDDTHSRIEHYASRLAEMENSNGSYLNDSISPNESIDDEHLLIQHYCQSLNQDSPLSQPRSPAQILISLESEERGELERILADLEEENRNLQAEYDRLKQQHEHKGLSPLPSPPEMMPTSPQSPRDAELIAEAKLLRQHKGRLEARMQILEDHNKQLESQLHRLRQLLEQPQAEAKVNGTTVSSPSTSLQRSDSSQPMLLRVVGSQTSDSMGEEDLLSPPQDTSTGLEEVMEQLNNSFPSSRGRNTPGKPMREDTM

SEQ ID NO: 50 - protein, 391 aa, Homo sapiens
MDLEKNYPTPRTSRTGHGGVNQLGGVFVNGRPLPDVVRQRIVELAHQGVRPCDISRQLRVSHGCVSKILGRYYETGSIKPGVIGGSKPKVATPKVVEKIAEYKRQNPTMFAWEIRDRLLAERVCDNDTVPSVSSINRIIRTKVQQPPNQPVPASSHSIVSTGSVTQVSSVSTDSAGSSYSISGILGITSPSADTNKRKRDEGIQESPVPNGHSLPGRDFLRKQMRGDLFTQQQLEVLDRVFERQHYSDIFTTTEPIKPEQTTEYSAMASLAGGLDDMKANLASPTPADIGSSVPGPQSYPIVTGRDLASTTLPGYPPHVPPAGQGSYSAPTLTGMVPGSEFSGSPYSHPQYSSYNDSWRFPNPGLLGSPYYYSAAARGAAPPAAATAYDRH

SEQ ID NO: 51 - protein, 2009 aa, Homo sapiens
MEQTVLVPPGPDSFNFFTRESLAAIERRIAEEKAKNPKPDKKDDDENGPKPNSDLEAGKNLPFIYGDIPPEMVSEPLEDLDPYYINKKTFIVLNKGKAIFRFSATSALYILTPFNPLRKIAIKILVHSLFSMLIMCTILTNCVFMTMSNPPDWTKNVEYTFTGIYTFESLIKIIARGFCLEDFTFLRDPWNWLDFTVITFAYVTEFVDLGNVSALRTFRVLRALKTISVIPGLKTIVGALIQSVKKLSDVMILTVFCLSVFALIGLQLFMGNLRNKCIQWPPTNASLEEHSIEKNITVNYNGTLINETVFEFDWKSYIQDSRYHYFLEGFLDALLCGNSSDAGQCPEGYMCVKAGRNPNYGYTSFDTFSWAFLSLFRLMTQDFWENLYQLTLRAAGKTYMIFFVLVIFLGSFYLINLILAVVAMAYEEQNQATLEEAEQKEAEFQQMIEQLKKQQEAAQQAATATASEHSREPSAAGRLSDSSSEASKLSSKSAKERRNRRKKRKQKEQSGGEEKDEDEFQKSESEDSIRRKGFRFSIEGNRLTYEKRYSSPHQSLLSIRGSLFSPRRNSRTSLFSFRGRAKDVGSENDFADDEHSTFEDNESRRDSLFVPRRHGERRNSNLSQTSRSSRMLAVFPANGKMHSTVDCNGVVSLVGGPSVPTSPVGQLLPEVIIDKPATDDNGTTTETEMRKRRSSSFHVSMDFLEDPSQRQRAMSIASILTNTVEELEESRQKCPPCWYKFSNIFLIWDCSPYWLKVKHVVNLVVMDPFVDLAITICIVLNTLFMAMEHYPMTDHFNNVLTVGNLVFTGIFTAEMFLKIIAMDPYYYFQEGWNIFDGFIVTLSLVELGLANVEGLSVLRSFRLLRVFKLAKSWPTLNMLIKIIGNSVGALGNLTLVLAIIVFIFAVVGMQLFGKSYKDCVCKIASDCQLPRWHMNDFFHSFLIVFRVLCGEWIETMWDCMEVAGQAMCLTVFMMVMVIGNLVVLNLFLALLLSSFSADNLAATDDDNEMNNLQIAVDRMHKGVAYVKRKIYEFIQQSFIRKQKILDEIKPLDDLNNKKDSCMSNHTAEIGKDLDYLKDVNGTTSGIGTGSSVEKYIIDESDYMSFINNPSLTVTVPIAVGESDFENLNTEDFSSESDLEESKEKLNESSSSSEGSTVDIGAPVEEQPVVEPEETLEPEACFTEGCVQRFKCCQINVEEGRGKQWWNLRRTCFRIVEHNWFETFIVFMILLSSGALAFEDIYIDQRKTIKTMLEYADKVFTYIFILEMLLKWVAYGYQTYFTNAWCWLDFLIVDVSLVSLTANALGYSELGAIKSLRTLRALRPLRALSRFEGMRVVVNALLGAIPSIMNVLLVCLIFWLIFSIMGVNLFAGKFYHCINTTTGDRFDIEDVNNHTDCLKLIERNETARWKNVKVNFDNVGFGYLSLLQVATFKGWMDIMYAAVDSRNVELQPKYEESLYMYLYFVIFIIFGSFFTLNLFIGVIIDNFNQQKKKFGGQDIFMTEEQKKYYNAMKKLGSKKPQKPIPRPGNKFQGMVFDFVTRQVFDISIMILICLNMVTMMVETDDQSEYVTTILSRINLVFIVLFTGECVLKLISLRHYYFTIGWNIFDFVVVILSIVGMFLAELIEKYFVSPTLFRVIRLARIGRILRLIKGAKGIRTLLFALMMSLPALFNIGLLLFLVMFIYAIFGMSNFAYVKREVGIDDMFNFETFGNSMICLFQITTSAGWDGLLAPILNSKPPDCDPNKVNPGSSVKGDCGNPSVGIFFFVSYIIISFLVVVNMYIAVILENFSVATEESAEPLSEDDFEMFYEVWEKFDPDATQFMEFEKLSQFAAALEPPLNLPQPNKLQLIAMDLPMVSGDRIHCLDILFAFTKRVLGESGEMDALRIQMEERFMASNPSKVSYQPITTTLKRKQEEVSAVIIQRAYRRHLLKRTVKQASFTYNKNKIKGGANLLIKEDMIIDRINENSITEKTDLTMSTAACPPSYDRVTKPIVEKHEQEGKDEKAKGK

SEQ ID NO: 52 - protein, 653 aa, Homo sapiens
MRPLRPRAALLALLASLLAAPPVAPAEAPHLVHVDAARALWPLRRFWRSTGFCPPLPHSQADQYVLSWDQQLNLAYVGAVPHRGIKQVRTHWLLELVTTRGSTGRGLSYNFTHLDGYLDLLRENQLLPGFELMGSASGHFTDFEDKQQVFEWKDLVSSLARRYIGRYGLAHVSKWNFETWNEPDHHDFDNVSMTMQGFLNYYDACSEGLRAASPALRLGGPGDSFHTPPRSPLSWGLLRHCHDGTNFFTGEAGVRLDYISLHRKGARSSISILEQEKVVAQQIRQLFPKFADTPIYNDEADPLVGWSLPQPWRADVTYAAMVVKVIAQHQNLLLANTTSAFPYALLSNDNAFLSYHPHPFAQRTLTARFQVNNTRPPHVQLLRKPVLTAMGLLALLDEEQLWAEVSQAGTVLDSNHTVGVLASAHRPQGPADAWRAAVLIYASDDTRAHPNRSVAVTLRLRGVPPGPGLVYVTRYLDNGLCSPDGEWRRLGRPVFPTAEQFRRMRAAEDPVAAAPRPLPAGGRLTLRPALRLPSLLLVHVCARPEKPPGQVTRLRALPLTQGQLVLVWSDEHVGSKCLWTYEIQFSQDGKAYTPVSRKPSTFNLFVFSPDTGAVSGSYRVRALDYWARPGPFSDPVPYLEVPVPRGPPSPGNP

SEQ ID NO: 53 - protein, 153 aa, Homo sapiens
MLRFIQEVNTTTRSCALWDLEEDTEYIVHVQAISIQGQSPASEPVLFKTPREAEKMASKNKDEVTMKEMGRNQQLRTGEVLIIVVVLFMWAGVIALFCRQYDIIKDNEPNNNKEKTKSASETSTPEHQGGGLLRSKVRARPGPGWATLCLMLW

SEQ ID NO: 54 - protein, 463 aa, Homo sapiens
MHSASSMLGAVKMEGHEPSDWSSYYAEPEGYSSVSNMNAGLGMNGMNTYMSMSAAAMGSGSGNMSAGSMNMSSYVGAGMSPSLAGMSPGAGAMAGMGGSAGAAGVAGMGPHLSPSLSPLGGQAAGAMGGLAPYANMNSMSPMYGQAGLSRARDPKTYRRSYTHAKPPYSYISLITMAIQQSPNKMLTLSEIYQWIMDLFPFYRQNQQRWQNSIRHSLSFNDCFLKVPRSPDKPGKGSFWTLHPDSGNMFENGCYLRRQKRFKCEKQLALKEAAGAAGSGKKAAAGAQASQAQLGEAAGPASETPAGTESPHSSASPCQEHKRGGLGELKGTPAAALSPPEPAPSPGQQQQAAAHLLGPPHHPGLPPEAHLKPEHHYAFNHPFSINNLMSSEQQHHHSHHHHQPHKMDLKAYEQVMHYPGYGSPMPGSLAMGPVTNKTGLDASPLAADTSYYQGVYSRPIMNSS

SEQ ID NO: 55 - protein, 431 aa, Homo sapiens
MPNPRPGKPSAPSLALGPSPGASPSWRAAPKASDLLGARGPGGTFQGRDLRGGAHASSSSLNPMPPSQLQLPTLPLVMVAPSGARLGPLPHLQALLQDRPHFMHQLSTVDAHARTPVLQVHPLESPAMISLTPPTTATGVFSLKARPGLPPGINVASLEWVSREPALLCTFPNPSAPRKDSTLSAVPQSSYPLLANGVCKWPGCEKVFEEPEDFLKHCQADHLLDEKGRAQCLLQREMVQSLEQQLVLEKEKLSAMQAHLAGKMALTKASSVASSDKGSCCIVAAGSQGPVVPAWSGPREAPDSLFAVRRHLWGSHGNSTFPEFLHNMDYFKFHNMRPPFTYATLIRWAILEAPEKQRTLNEIYHWFTRMFAFFRNHPATWKNAIRHNLSLHKCFVRVESEKGAVWTVDELEFRKKRSQRPSRCSNPTPGP

SEQ ID NO: 56 - protein, 474 aa, Homo sapiens
MRLSKTLVDMDMADYSAALDPAYTTLEFENVQVLTMGNDTSPSEGTNLNAPNSLGVSALCAICGDRATGKHYGASSCDGCKGFFRRSVRKNHMYSCRFSRQCVVDKDKRNQCRYCRLKKCFRAGMKKEAVQNERDRISTRRSSYEDSSLPSINALLQAEVLSRQITSPVSGINGDIRAKKIASIADVCESMKEQLLVLVEWAKYIPAFCELPLDDQVALLRAHAGEHLLLGATKRSMVFKDVLLLGNDYIVPRHCPELAEMSRVSIRILDELVLPFQELQIDDNEYAYLKAIIFFDPDAKGLSDPGKIKRLRSQVQVSLEDYINDRQYDSRGRFGELLLLLPTLQSITWQMIEQIQFIKLFGMAKIDNLLQEMLLGGSPSDAPHAHHPLHPHLMQEHMGTNVIVANTMPTHLSNGQMCEWPRPRGQAATPETPQPSPPGGSGSEPYKLLPGAVATIVKPLSAIPQPTITKQEVI

SEQ ID NO: 57 - protein, 1240 aa, Homo sapiens
CACATTGTTCTGATCATCTGAAGATCAGCTATTAGAAGAGAAAGATCAGTTAAGTCCTTTGGACCTGATCAGCTTGATACAAGAACTACTGATTTCAACTTCTTTGGCTTAATTCTCTCGGAAACGATGAAATATACAAGTTATATCTTGGCTTTTCAGCTCTGCATCGTTTTGGGTTCTCTTGGCTGTTACTGCCAGGACCCATATGTAAAAGAAGCAGAAAACCTTAAGAAATATTTTAATGCAGGTCATTCAGATGTAGCGGATAATGGAACTCTTTTCTTAGGCATTTTGAAGAATTGGAAAGAGGAGAGTGACAGAAAAATAATGCAGAGCCAAATTGTCTCCTTTTACTTCAAACTTTTTAAAAACTTTAAAGATGACCAGAGCATCCAAAAGAGTGTGGAGACCATCAAGGAAGACATGAATGTCAAGTTTTTCAATAGCAACAAAAAGAAACGAGATGACTTCGAAAAGCTGACTAATTATTCGGTAACTGACTTGAATGTCCAACGCAAAGCAATACATGAACTCATCCAAGTGATGGCTGAACTGTCGCCAGCAGCTAAAACAGGGAAGCGAAAAAGGAGTCAGATGCTGTTTCGAGGTCGAAGAGCATCCCAGTAATGGTTGTCCTGCCTGCAATATTTGAATTTTAAATCTAAATCTATTTATTAATATTTAACATTATTTATATGGGGAATATATTTTTAGACTCATCAATCAAATAAGTATTTATAATAGCAACTTTTGTGTAATGAAAATGAATATCTATTAATATATGTATTATTTATAATTCCTATATCCTGTGACTGTCTCACTTAATCCTTTGTTTTCTGACTAATTAGGCAAGGCTATGTGATTACAAGGCTTTATCTCAGGGGCCAACTAGGCAGCCAACCTAAGCAAGATCCCATGGGTTGTGTGTTTATTTCACTTGATGATACAATGAACACTTATAAGTGAAGTGATACTATCCAGTTACTGCCGGTTTGAAAATATGCCTGCAATCTGAGCCAGTGCTTTAATGGCATGTCAGACAGAACTTGAATGTGTCAGGTGACCCTGATGAAAACATAGCATCTCAGGAGATTTCATGCCTGGTGCTTCCAAATATTGTTGACAACTGTGACTGTACCCAAATGGAAAGTAACTCATTTGTTAAAATTATCAATATCTAATATATATGAATAAAGTGTAAGTTCACAACAAAAAAAAAAAAAAAAAAAAAAAAAAAAAA

SEQ ID NO: 58 - protein, 178 aa, Homo sapiens
MHSSALLCCLVLLTGVRASPGQGTQSENSCTHFPGNLPNMLRDLRDAFSRVKTFFQMKDQLDNLLLKESLLEDFKGYLGCQALSEMIQFYLEEVMPQAENQDPDIKAHVNSLGENLKTLRLRLRRCHRFLPCENKSKAVEQVKNAFNKLQEKGIYKAMSEFDIFINYIEAYMTMKIRN

SEQ ID NO: 59 - protein, 153 aa, Homo sapiens
MYRMQLLSCIALSLALVTNSAPTSSSTKKTQLQLEHLLLDLQMILNGINNYKNPKLTRMLTFKFYMPKKATELKHLQCLEEELKPLEEVLNLAQSKNFHLRPRDLISNINVIVLELKGSETTFMCEYADETATIVEFLNRWITFCQSIISTLT

SEQ ID NO: 60 - protein, 177 aa, Homo sapiens
MKLQCVSLWLLGTILILCSVDNHGLRRCLISTDMHHIEESFQEIKRAIQAKDTFPNVTILSTLETLQIIKPLDVCCVTKNLLAFYVDRVFKDHQEPNPKILRKISSIANSFLYMQKTLRQCQEQRQCHCRQEATNATRVIHDNYDQLEVHAAAIKSLGELDVFLAWINKNHEVMFSA

SEQ ID NO: 61 - protein, 382 aa, Homo sapiens
MLDGLKMEENFQSAIDTSASFSSLLGRAVSPKSVCEGCQRVILDRFLLRLNDSFWHEQCVQCASCKEPLETTCFYRDKKLYCKYDYEKLFAVKCGGCFEAIAPNEFVMRAQKSVYHLSCFCCCVCERQLQKGDEFVLKEGQLLCKGDYEKERELLSLVSPAASDSGKSDDEESLCKSAHGAGKGTAEEGKDHKRPKRPRTILTTQQRRAFKASFEVSSKPCRKVRETLAAETGLSVRVVQVWFQNQRAKMKKLARRQQQQQQDQQNTQRLSSAQTNGGGSAGMEGIMNPYTALPTPQQLLAIEQSVYSSDPFRQGLTPPQMPGDHMHPYGAEPLFHDLDSDDTSLSNLGDCFLATSEAGPLQSRVGNPIDHLYSMQNSYFTS

SEQ ID NO: 62 - protein, 311 aa, Homo sapiens
MRGAARAAWGRAGQPWPRPPAPGPPPPPLPLLLLLLAGLLGGAGAQYSSDRCSWKGSGLTHEAHRKEVEQVYLRCAAGAVEWMYPTGALIVNLRPNTFSPARHLTVCIRSFTDSSGANIYLEKTGELRLLVPDGDGRPGRVQCFGLEQGGLFVEATPQQDIGRRTTGFQYELVRRHRASDLHELSAPCRPCSDTEVLLAVCTSDFAVRGSIQQVTHEPERQDSAIHLRVSRLYRQKSRVFEPVPEGDGHWQGRVRTLLECGVRPGHGDFLFTGHMHFGEARLGCAPRFKDFQRMYRDAQERGLNPCEVGTD

SEQ ID NO: 63 - protein, 598 aa, Homo sapiens
MPCVQAQYGSSPQGASPASQSYSYHSSGEYSSDFLTPEFVKFSMDLTNTEITATTSLPSFSTFMDNYSTGYDVKPPCLYQMPLSGQQSSIKVEDIQMHNYQQHSHLPPQSEEMMPHSGSVYYKPSSPPTPTTPGFQVQHSPMWDDPGSLHNFHQNYVATTHMIEQRKTPVSRLSLFSFKQSPPGTPVSSCQMRFDGPLHVPMNPEPAGSHHVVDGQTFAVPNPIRKPASMGFPGLQIGHASQLLDTQVPSPPSRGSPSNEGLCAVCGDNAACQHYGVRTCEGCKGFFKRTVQKNAKYVCLANKNCPVDKRRRNRCQYCRFQKCLAVGMVKEVVRTDSLKGRRGRLPSKPKSPQEPSPPSPPVSLISALVRAHVDSNPAMTSLDYSRFQANPDYQMSGDDTQHIQQFYDLLTGSMEIIRGWAEKIPGFADLPKADQDLLFESAFLELFVLRLAYRSNPVEGKLIFCNGVVLHRLQCVRGFGEWIDSIVEFSSNLQNMNIDISAFSCIAALAMVTERHGLKEPKRVEELQNKIVNCLKDHVTFNNGGLNRPNYLSKLLGKLPELRTLCTQGLQRIFYLKLEDLVPPPAIIDKLFLDTLPF

SEQ ID NO: 64 - protein, 452 aa, Homo sapiens
MFDIEYFRKDPRPFFKFAKEIYPGQFQPSLCHKFIALSDKEGKLLRNYTQNIDTLEQVAGIQRIIQCHGSFATASCLICKYKVDCEAVRGDIFNQVVPRCPRCPADEPLAIMKPEIVFFGENLPEQFHRAMKYDKDEVDLLIVIGSSLKVRPVALIPSSIPHEVPQILINREPLPHLHFDVELLGDCDVIINELCHRLGGEYAKLCCNPVKLSEITEKPPRTQKELAYLSELPPTPLHVSEDSSSPERTSPPDSSVIVTLLDQAAKSNDDLDVSESKGCMEEKPQEVQTSRNVESIAEQMENPDLKNVGSSTGEKNERTSVAGTVRKCWPNRVAKEQISRRLDGNQYLFLPPNRYIFHGAEVYSDSEDDVLSSSSCGSNSDSGTCQSPSLEEPMEDESEIEEFYNGLEDEPDVPERAGGAGFGTDGDDQEAINEAISVKQEVTDMNYPSNKS

SEQ ID NO: 65 - protein, 497 aa, Homo sapiens
MPTPDATTPQAKGFRRAVSELDAKQAEAIMSPRFIGRRQSLIEDARKEREAAVAAAAAAVPSEPGDPLEAVAFEEKEGKAVLNLLFSPRATKPSALSRAVKVFETFEAKIHHLETRPAQRPRAGGPHLEYFVRLEVRRGDLAALLSGVRQVSEDVRSPAGPKVPWFPRKVSELDKCHHLVTKFDPDLDLDHPGFSDQVYRQRRKLIAEIAFQYRHGDPIPRVEYTAEEIATWKEVYTTLKGLYATHACGEHLEAFALLERFSGYREDNIPQLEDVSRFLKERTGFQLRPVAGLLSARDFLASLAFRVFQCTQYIRHASSPMHSPEPDCCHELLGHVPMLADRTFAQFSQDIGLASLGASDEEIEKLSTLYWFTVEFGLCKQNGEVKAYGAGLLSSYGELLHCLSEEPEIRAFDPEAAAVQPYQDQTYQSVYFVSESFSDAKDKLRSYASRIQRPFSVKFDPYTLAIDVLDSPQAVRRSLEGVQDELDTLAHALSAIG

SEQ ID NO: 66 - protein, 193 aa, Homo sapiens
MGVHECPAWLWLLLSLLSLPLGLPVLGAPPRLICDSRVLERYLLEAKEAENITTGCAEHCSLNENITVPDTKVNFYAWKRMEVGQQAVEVWQGLALLSEAVLRGQALLVNSSQPWEPLQLHVDKAVSGLRSLTTLLRALGAQKEAISPPDAASAAPLRTITADTFRKLFRVYSNFLRGKLKLYTGEACRTGDR

SEQ ID NO: 67 - protein, 198 aa, Homo sapiens
MSNVRVSNGSPSLERMDARQAEHPKPSACRNLFGPVDHEELTRDLEKHCRDMEEASQRKWNFDFQNHKPLEGKYEWQEVEKGSLPEFYYRPPRPPKGACKVPAQESQDVSGSRPAAPLIGAPANSEDTHLVDPKTDPSDSQTGLAEQCAGIRKRPATDDSSTQNKRANRTEENVSDGSPNAGSVEQTPKKPGLRRRQT

SEQ ID NO: 68 - protein, 444 aa, Homo sapiens
MCNTNMSVPTDGAVTTSQIPASEQETLVRPKPLLLKLLKSVGAQKDTYTMKEVLFYLGQYIMTKRLYDEKQQHIVYCSNDLLGDLFGVPSFSVKEHRKIYTMIYRNLVVVNQQESSDSGTSVSENRCHLEGGSDQKDLVQELQEEKPSSSHLVSRPSTSSRRRAISETEENSDELSGERQRKRHKSDSISLSFDESLALCVIREICCERSSSSESTGTPSNPDLDAGVYQVTVYQAGESDTDSFEEDPEISLADYWKCTSCNEMNPPLPSHCNRCWALRENWLPEDKGKDKGEISEKAKLENSTQAEEGFDVPDCKKTIVNDSRESCVEENDDKITQASQSQESEDYSQPSTSSSIIYSSQEDVKEFEREETQDKEESVESSLPLNAIEPCVICQGRPKNGCIVHGKTGHLMACFTCAKKLKKRNKPCPVCRQPIQMIVLTYFP

SEQ ID NO: 69 - protein, 198 aa, Homo sapiens
MPVPALCLLWALAMVTRPASAAPMGGPELAQHEELTLLFHGTLQLGQALNGVYRTTEGRLTKARNSLGLYGRTIELLGQEVSRGRDAAQELRASLLETQMEEDILQLQAEATAEVLGEVAQAQKVLRDSVQRLEVQLRSAWLGPAYREFEVLKAHADKQSHILWALTGHVQRQRREMVAQQHRLRQIQERLHTAALPA

SEQ ID NO: 70 - protein, 444 aa, Homo sapiens
MVSQALRLLCLLLGLQGCLAAVFVTQEEAHGVLHRRRRANAFLEELRPGSLERECKEEQCSFEEAREIFKDAERTKLFWISYSDGDQCASSPCQNGGSCKDQLQSYICFCLPAFEGRNCETHKDDQLICVNENGGCEQYCSDHTGTKRSCRCHEGYSLLADGVSCTPTVEYPCGKIPILEKRNASKPQGRIVGGKVCPKGECPWQVLLLVNGAQLCGGTLINTIWVVSAAHCFDKIKNWRNLIAVLGEHDLSEHDGDEQSRRVAQVIIPSTYVPGTTNHDIALLRLHQPVVLTDHVVPLCLPERTFSERTLAFVRFSLVSGWGQLLDRGATALELMVLNVPRLMTQDCLQQSRKVGDSPNITEYMFCAGYSDGSKDSCKGDSGGPHATHYRGTWYLTGIVSWGQGCATVGHFGVYTRVSQYIEWLQKLMRSEPRPGVLLRAPFP

SEQ ID NO: 71 - protein, 2351 aa, Homo sapiens
MQIELSTCFFLCLLRFCFSATRRYYLGAVELSWDYMQSDLGELPVDARFPPRVPKSFPFNTSVVYKKTLFVEFTDHLFNIAKPRPPWMGLLGPTIQAEVYDTVVITLKNMASHPVSLHAVGVSYWKASEGAEYDDQTSQREKEDDKVFPGGSHTYVWQVLKENGPMASDPLCLTYSYLSHVDLVKDLNSGLIGALLVCREGSLAKEKTQTLHKFILLFAVFDEGKSWHSETKNSLMQDRDAASARAWPKMHTVNGYVNRSLPGLIGCHRKSVYWHVIGMGTTPEVHSIFLEGHTFLVRNHRQASLEISPITFLTAQTLLMDLGQFLLFCHISSHQHDGMEAYVKVDSCPEEPQLRMKNNEEAEDYDDDLTDSEMDVVRFDDDNSPSFIQIRSVAKKHPKTWVHYIAAEEEDWDYAPLVLAPDDRSYKSQYLNNGPQRIGRKYKKVRFMAYTDETFKTREAIQHESGILGPLLYGEVGDTLLIIFKNQASRPYNIYPHGITDVRPLYSRRLPKGVKHLKDFPILPGEIFKYKWTVTVEDGPTKSDPRCLTRYYSSFVNMERDLASGLIGPLLICYKESVDQRGNQIMSDKRNVILFSVFDENRSWYLTENIQRFLPNPAGVQLEDPEFQASNIMHSINGYVFDSLQLSVCLHEVAYWYILSIGAQTDFLSVFFSGYTFKHKMVYEDTLTLFPFSGETVFMSMENPGLWILGCHNSDFRNRGMTALLKVSSCDKNTGDYYEDSYEDISAYLLSKNNAIEPRSFSQNSRHPSTRQKQFNATTIPENDIEKTDPWFAHRTPMPKIQNVSSSDLLMLLRQSPTPHGLSLSDLQEAKYETFSDDPSPGAIDSNNSLSEMTHFRPQLHHSGDMVFTPESGLQLRLNEKLGTTAATELKKLDFKVSSTSNNLISTIPSDNLAAGTDNTSSLGPPSMPVHYDSQLDTTLFGKKSSPLTESGGPLSLSEENNDSKLLESGLMNSQESSWGKNVSSTESGRLFKGKRAHGPALLTKDNALFKVSISLLKTNKTSNNSATNRKTHIDGPSLLIENSPSVWQNILESDTEFKKVTPLIHDRMLMDKNATALRLNHMSNKTTSSKNMEMVQQKKEGPIPPDAQNPDMSFFKMLFLPESARWIQRTHGKNSLNSGQGPSPKQLVSLGPEKSVEGQNFLSEKNKVVVGKGEFTKDVGLKEMVFPSSRNLFLTNLDNLHENNTHNQEKKIQEEIEKKETLIQENVVLPQIHTVTGTKNFMKNLFLLSTRQNVEGSYDGAYAPVLQDFRSLNDSTNRTKKHTAHFSKKGEEENLEGLGNQTKQIVEKYACTTRISPNTSQQNFVTQRSKRALKQFRLPLEETELEKRIIVDDTSTQWSKNMKHLTPSTLTQIDYNEKEKGAITQSPLSDCLTRSHSIPQANRSPLPIAKVSSFPSIRPIYLTRVLFQDNSSHLPAASYRKKDSGVQESSHFLQGAKKNNLSLAILTLEMTGDQREVGSLGTSATNSVTYKKVENTVLPKPDLPKTSGKVELLPKVHIYQKDLFPTETSNGSPGHLDLVEGSLLQGTEGAIKWNEANRPGKVPFLRVATESSAKTPSKLLDPLAWDNHYGTQIPKEEWKSQEKSPEKTAFKKKDTILSLNACESNHAIAAINEGQNKPEIEVTWAKQGRTERLCSQNPPVLKRHQREITRTTLQSDQEEIDYDDTISVEMKKEDFDIYDEDENQSPRSFQKKTRHYFIAAVERLWDYGMSSSPHVLRNRAQSGSVPQFKKVVFQEFTDGSFTQPLYRGELNEHLGLLGPYIRAEVEDNIMVTFRNQASRPYSFYSSLISYEEDQRQGAEPRKNFVKPNETKTYFWKVQHHMAPTKDEFDCKAWAYFSDVDLEKDVHSGLIGPLLVCHTNTLNPAHGRQVTVQEFALFFTIFDETKSWYFTENMERNCRAPCNIQMEDPTFKENYRFHAINGYIMDTLPGLVMAQDQRIRWYLLSMGSNENIHSIHFSGHVFTVRKKEEYKMALYNLYPGVFETVEMLPSKAGIWRVECLIGEHLHAGMSTLFLVYSNKCQTPLGMASGHIRDFQITASGQYGQWAPKLARLHYSGSINAWSTKEPFSWIKVDLLAPMIIHGIKTQGARQKFSSLYISQFIIMYSLDGKKWQTYRGNSTGTLMVFFGNVDSSGIKHNIFNPPIIARYIRLHPTHYSIRSTLRMELMGCDLNSCSMPLGMESKAISDAQITASSYFTNMFATWSPSKARLHLQGRSNAWRPQVNNPKEWLQVDFQKTMKVTGVTTQGVKSLLTSMYVKEFLISSSQDGHQWTLFFQNGKVKVFQGNQDSFTPVVNSLDPPLLTRYLRIHPQSWVHQIALRMEVLGCEAQDLY

SEQ ID NO: 72 - DNA, 19 bp, Homo sapiens
ccagcattccagggagact

SEQ ID NO: 73 - DNA, 19 bp, Homo sapiens
ggctgagatctgagccgaa

SEQ ID NO: 74 - DNA, 19 bp, Homo sapiens
cccagctcatcagatatta

SEQ ID NO: 75 - DNA, 19 bp, Homo sapiens
gcgagatatccacggtatt

SEQ ID NO: 76 - DNA, 19 bp, Homo sapiens
gtgtatgtcttcttcaaga

SEQ ID NO: 77 - DNA, 19 bp, Homo sapiens
gaggcattgtcatggaaag

SEQ ID NO: 78 - DNA, 19 bp, Homo sapiens
gggatttgtctttccagat

SEQ ID NO: 79 - DNA, 19 bp, Homo sapiens
cagctttcatcctgaagga

SEQ ID NO: 80 - DNA, 19 bp, Homo sapiens
cgttgcattccaagaggtt

SEQ ID NO: 81 - DNA, 19 bp, Homo sapiens
ggaacttagagttcaagga

SEQ ID NO: 82 - DNA, 19 bp, Homo sapiens
gggacagatcccagatatc

SEQ ID NO: 83 - DNA, 19 bp, Homo sapiens
gggcataatctcagaatta

SEQ ID NO: 84 - DNA, 19 bp, Homo sapiens
agggcataatctcagaatt

SEQ ID NO: 85 - DNA, 19 bp, Homo sapiens
ggcataatctcagaattac

SEQ ID NO: 86 - DNA, 19 bp, Homo sapiens
cccagctcatcagatatta

SEQ ID NO: 87 - DNA, 19 bp, Homo sapiens
cttaagagttcaaggatca

SEQ ID NO: 88 - DNA, 19 bp, Homo sapiens
agatattgtccgcctccaa

SEQ ID NO: 89 - DNA, 19 bp, Homo sapiens
agatcgtgggcaagttata

SEQ ID NO: 90 - DNA, 19 bp, Homo sapiens
ggctgagatctgagccgaa

SEQ ID NO: 91 - RNA, 19 nt, Homo sapiens
ccagcauuccagggagacu

SEQ ID NO: 92 - RNA, 19 nt, Homo sapiens
agucucccuggaaugcugg

SEQ ID NO: 93 - RNA, 19 nt, Homo sapiens
ggcugagaucugagccgaa

SEQ ID NO: 94 - RNA, 19 nt, Homo sapiens
uucggcucagaucucagcc

SEQ ID NO: 95 - RNA, 19 nt, Homo sapiens
cccagcucaucagauauua

SEQ ID NO: 96 - RNA, 19 nt, Homo sapiens
uaauaucugaugagcuggg

SEQ ID NO: 97 - RNA, 19 nt, Homo sapiens
gcgagauauccacgguauu

SEQ ID NO: 98 - RNA, 19 nt, Homo sapiens
aauaccguggauaucucgc

SEQ ID NO: 99 - RNA, 19 nt, Homo sapiens
guguaugucuucuucaaga

SEQ ID NO: 100 - RNA, 19 nt, Homo sapiens
ucuugaagaagacauacac

SEQ ID NO: 101 - RNA, 19 nt, Homo sapiens
gaggcauugucauggaaag

SEQ ID NO: 102 - RNA, 19 nt, Homo sapiens
cuuuccaugacaaugccuc

SEQ ID NO: 103 - RNA, 19 nt, Homo sapiens
gggauuugucuuuccagau

SEQ ID NO: 104 - RNA, 19 nt, Homo sapiens
aucuggaaagacaaauccc

SEQ ID NO: 105 - RNA, 19 nt, Homo sapiens
cagcuuucauccugaagga

SEQ ID NO: 106 - RNA, 19 nt, Homo sapiens
uccuucaggaugaaagcug

SEQ ID NO: 107 - RNA, 19 nt, Homo sapiens
cguugcauuccaagagguu

SEQ ID NO: 108 - RNA, 19 nt, Homo sapiens
aaccucuuggaaugcaacg

SEQ ID NO: 109 - RNA, 19 nt, Homo sapiens
ggaacuuagaguucaagga

SEQ ID NO: 110 - RNA, 19 nt, Homo sapiens
uccuugaacucuaaguucc

SEQ ID NO: 111 - RNA, 19 nt, Homo sapiens
gggacagaucccagauauc

SEQ ID NO: 112 - RNA, 19 nt, Homo sapiens
gauaucugggaucuguccc

SEQ ID NO: 113 - RNA, 19 nt, Homo sapiens
gggcauaaucucagaauua

SEQ ID NO: 114 - RNA, 19 nt, Homo sapiens
uaauucugagauuaugccc

SEQ ID NO: 115 - RNA, 19 nt, Homo sapiens
agggcauaaucucagaauu

SEQ ID NO: 116 - RNA, 19 nt, Homo sapiens
aauucugagauuaugcccu

SEQ ID NO: 117 - RNA, 19 nt, Homo sapiens
ggcauaaucucagaauuac

SEQ ID NO: 118 - RNA, 19 nt, Homo sapiens
guaauucugagauuaugcc

SEQ ID NO: 119 - RNA, 19 nt, Homo sapiens
cccagcucaucagauauua

SEQ ID NO: 120 - RNA, 19 nt, Homo sapiens
uaauaucugaugagcuggg

SEQ ID NO: 121 - RNA, 19 nt, Homo sapiens
cuuaagaguucaaggauca

SEQ ID NO: 122 - RNA, 19 nt, Homo sapiens
ugauccuugaacucuuaag

SEQ ID NO: 123 - RNA, 19 nt, Homo sapiens
agauauuguccgccuccaa

SEQ ID NO: 124 - RNA, 19 nt, Homo sapiens
uuggaggcggacaauaucu

SEQ ID NO: 125 - RNA, 19 nt, Homo sapiens
agaucgugggcaaguuaua

SEQ ID NO: 126 - RNA, 19 nt, Homo sapiens
uauaacuugcccacgaucu

SEQ ID NO: 127 - RNA, 19 nt, Homo sapiens
ggcugagaucugagccgaa

SEQ ID NO: 128 - RNA, 19 nt, Homo sapiens
uucggcucagaucucagcc

SEQ ID NO: 129 - RNA, 21 nt, Homo sapiens
ccagcauuccagggagacuuu

SEQ ID NO: 130 - RNA, 21 nt, Homo sapiens
agucucccuggaaugcugguu

SEQ ID NO: 131 - RNA, 21 nt, Homo sapiens
ggcugagaucugagccgaauu

SEQ ID NO: 132 - RNA, 21 nt, Homo sapiens
uucggcucagaucucagccuu

SEQ ID NO: 133 - RNA, 21 nt, Homo sapiens
cccagcucaucagauauuauu

SEQ ID NO: 134 - RNA, 21 nt, Homo sapiens
uaauaucugaugagcuggguu

SEQ ID NO: 135 - RNA, 21 nt, Homo sapiens
gcgagauauccacgguauuuu

SEQ ID NO: 136 - RNA, 21 nt, Homo sapiens
aauaccguggauaucucgcuu

SEQ ID NO: 137 - RNA, 21 nt, Homo sapiens
guguaugucuucuucaagauu

SEQ ID NO: 138 - RNA, 21 nt, Homo sapiens
ucuugaagaagacauacacuu

SEQ ID NO: 139 - RNA, 21 nt, Homo sapiens
gaggcauugucauggaaaguu

SEQ ID NO: 140 - RNA, 21 nt, Homo sapiens
cuuuccaugacaaugccucuu

SEQ ID NO: 141 - RNA, 21 nt, Homo sapiens
gggauuugucuuuccagauuu

SEQ ID NO: 142 - RNA, 21 nt, Homo sapiens
aucuggaaagacaaaucccuu

SEQ ID NO: 143 - RNA, 21 nt, Homo sapiens
cagcuuucauccugaaggauu

SEQ ID NO: 144 - RNA, 21 nt, Homo sapiens
uccuucaggaugaaagcuguu

SEQ ID NO: 145 - RNA, 21 nt, Homo sapiens
cguugcauuccaagagguuuu

SEQ ID NO: 146 - RNA, 21 nt, Homo sapiens
aaccucuuggaaugcaacguu

SEQ ID NO: 147 - RNA, 21 nt, Homo sapiens
ggaacuuagaguucaaggauu

SEQ ID NO: 148 - RNA, 21 nt, Homo sapiens
uccuugaacucuaaguuccuu

SEQ ID NO: 149 - RNA, 21 nt, Homo sapiens
gggacagaucccagauaucuu

SEQ ID NO: 150 - RNA, 21 nt, Homo sapiens
gauaucugggaucugucccuu

SEQ ID NO: 151 - RNA, 21 nt, Homo sapiens
gggcauaaucucagaauuauu

SEQ ID NO: 152 - RNA, 21 nt, Homo sapiens
uaauucugagauuaugcccuu

SEQ ID NO: 153 - RNA, 21 nt, Homo sapiens
agggcauaaucucagaauuuu

SEQ ID NO: 154 - RNA, 21 nt, Homo sapiens
aauucugagauuaugcccuuu

SEQ ID NO: 155 - RNA, 21 nt, Homo sapiens
ggcauaaucucagaauuacuu

SEQ ID NO: 156 - RNA, 21 nt, Homo sapiens
guaauucugagauuaugccuu

SEQ ID NO: 157 - RNA, 21 nt, Homo sapiens
cccagcucaucagauauuauu

SEQ ID NO: 158 - RNA, 21 nt, Homo sapiens
uaauaucugaugagcuggguu

SEQ ID NO: 159 - RNA, 21 nt, Homo sapiens
cuuaagaguucaaggaucauu

SEQ ID NO: 160 - RNA, 21 nt, Homo sapiens
ugauccuugaacucuuaaguu

SEQ ID NO: 161 - RNA, 21 nt, Homo sapiens
agauauuguccgccuccaauu

SEQ ID NO: 162 - RNA, 21 nt, Homo sapiens
uuggaggcggacaauaucuuu

SEQ ID NO: 163 - RNA, 21 nt, Homo sapiens
agaucgugggcaaguuauauu

SEQ ID NO: 164 - RNA, 21 nt, Homo sapiens
uauaacuugcccacgaucuuu

SEQ ID NO: 165 - RNA, 21 nt, Homo sapiens
ggcugagaucugagccgaauu

SEQ ID NO: 166 - RNA, 21 nt, Homo sapiens
uucggcucagaucucagccuu

SEQ ID NO: 167 - DNA, 19 bp, Homo sapiens
gaaatttctcgatgtttaa

SEQ ID NO: 168 - DNA, 19 bp, Homo sapiens
aacgcatcttctgaaagat

SEQ ID NO: 169 - DNA, 19 bp, Homo sapiens
gcctgtaatcccagctatt

SEQ ID NO: 170 - DNA, 19 bp, Homo sapiens
gtgggaagttcctcaaatt

SEQ ID NO: 171 - DNA, 19 bp, Homo sapiens
gttgtatttctcgaccaaa

SEQ ID NO: 172 - DNA, 19 bp, Homo sapiens
gaaatgttcccgctgcaaa

SEQ ID NO: 173 - DNA, 19 bp, Homo sapiens
tagatttctgacccaagta

SEQ ID NO: 174 - DNA, 19 bp, Homo sapiens
gaaatgttcccgctgcaaa

SEQ ID NO: 175 - DNA, 19 bp, Homo sapiens
caagttcgcatgagtgatt

SEQ ID NO: 176 - DNA, 19 bp, Homo sapiens
tcgagttcctccttcagaa

SEQ ID NO: 177 - DNA, 19 bp, Homo sapiens
cacacatagctctgaagaa

SEQ ID NO: 178 - DNA, 19 bp, Homo sapiens
gaaatttctcgatgtttaa

SEQ ID NO: 179 - DNA, 19 bp, Homo sapiens
aacgcatcttctgaaagat

SEQ ID NO: 180 - DNA, 19 bp, Homo sapiens
cctgaaatttctcgatgtt

SEQ ID NO: 181 - DNA, 19 bp, Homo sapiens
ggagtctggacgtaaatat

SEQ ID NO: 182 - DNA, 18 bp, Homo sapiens
cgcctttggctgagtata

SEQ ID NO: 183 - DNA, 19 bp, Homo sapiens
gcctttggctgagtataaa

SEQ ID NO: 184 - DNA, 19 bp, Homo sapiens
aaacgcatcttctgaaaga

SEQ ID NO: 185 - RNA, 19 nt, Homo sapiens
gaaauuucucgauguuuaa

SEQ ID NO: 186 - RNA, 19 nt, Homo sapiens
uuaaacaucgagaaauuuc

SEQ ID NO: 187 - RNA, 19 nt, Homo sapiens
aacgcaucuucugaaagau

SEQ ID NO: 188 - RNA, 19 nt, Homo sapiens
aucuuucagaagaugcguu

SEQ ID NO: 189 - RNA, 19 nt, Homo sapiens
gccuguaaucccagcuauu

SEQ ID NO: 190 - RNA, 19 nt, Homo sapiens
aauagcugggauuacaggc

SEQ ID NO: 191 - RNA, 19 nt, Homo sapiens
gugggaaguuccucaaauu

SEQ ID NO: 192 - RNA, 19 nt, Homo sapiens
aauuugaggaacuucccac

SEQ ID NO: 193 - RNA, 19 nt, Homo sapiens
guuguauuucucgaccaaa

SEQ ID NO: 194 - RNA, 19 nt, Homo sapiens
uuuggucgagaaauacaac

SEQ ID NO: 195 - RNA, 19 nt, Homo sapiens
gaaauguucccgcugcaaa

SEQ ID NO: 196 - RNA, 19 nt, Homo sapiens
uuugcagcgggaacauuuc

SEQ ID NO: 197 - RNA, 19 nt, Homo sapiens
uagauuucugacccaagua

SEQ ID NO: 198 - RNA, 19 nt, Homo sapiens
uacuugggucagaaaucua

SEQ ID NO: 199 - RNA, 19 nt, Homo sapiens
gaaauguucccgcugcaaa

SEQ ID NO: 200 - RNA, 19 nt, Homo sapiens
uuugcagcgggaacauuuc

SEQ ID NO: 201 - RNA, 19 nt, Homo sapiens
caaguucgcaugagugauu

SEQ ID NO: 202 - RNA, 19 nt, Homo sapiens
aaucacucaugcgaacuug

SEQ ID NO: 203 - RNA, 19 nt, Homo sapiens
ucgaguuccuccuucagaa

SEQ ID NO: 204 - RNA, 19 nt, Homo sapiens
uucugaaggaggaacucga

SEQ ID NO: 205 - RNA, 19 nt, Homo sapiens
cacacauagcucugaagaa

SEQ ID NO: 206 - RNA, 19 nt, Homo sapiens
uucuucagagcuaugugug

SEQ ID NO: 207 - RNA, 19 nt, Homo sapiens
gaaauuucucgauguuuaa

SEQ ID NO: 208 - RNA, 19 nt, Homo sapiens
uuaaacaucgagaaauuuc

SEQ ID NO: 209 - RNA, 19 nt, Homo sapiens
aacgcaucuucugaaagau

SEQ ID NO: 210 - RNA, 19 nt, Homo sapiens
aucuuucagaagaugcguu

SEQ ID NO: 211 - RNA, 19 nt, Homo sapiens
ccugaaauuucucgauguu

SEQ ID NO: 212 - RNA, 19 nt, Homo sapiens
aacaucgagaaauuucagg

SEQ ID NO: 213 - RNA, 19 nt, Homo sapiens
ggagucuggacguaaauau

SEQ ID NO: 214 - RNA, 19 nt, Homo sapiens
auauuuacguccagacucc

SEQ ID NO: 215 - RNA, 19 nt, Homo sapiens
cgccuuuggcugaguauaa

SEQ ID NO: 216 - RNA, 19 nt, Homo sapiens
uuauacucagccaaaggcg

SEQ ID NO: 217 - RNA, 19 nt, Homo sapiens
gccuuuggcugaguauaaa

SEQ ID NO: 218 - RNA, 19 nt, Homo sapiens
uuuauacucagccaaaggc

SEQ ID NO: 219 - RNA, 19 nt, Homo sapiens
aaacgcaucuucugaaaga

SEQ ID NO: 220 - RNA, 19 nt, Homo sapiens
ucuuucagaagaugcguuu

SEQ ID NO: 221 - RNA, 21 nt, Homo sapiens
gaaauuucucgauguuuaauu

SEQ ID NO: 222 - RNA, 21 nt, Homo sapiens
uuaaacaucgagaaauuucuu

SEQ ID NO: 223 - RNA, 21 nt, Homo sapiens
aacgcaucuucugaaagauuu

SEQ ID NO: 224 - RNA, 21 nt, Homo sapiens
aucuuucagaagaugcguuuu

SEQ ID NO: 225 - RNA, 21 nt, Homo sapiens
gccuguaaucccagcuauuuu

SEQ ID NO: 226 - RNA, 21 nt, Homo sapiens
aauagcugggauuacaggcuu

SEQ ID NO: 227 - RNA, 21 nt, Homo sapiens
gugggaaguuccucaaauuuu

SEQ ID NO: 228 - RNA, 21 nt, Homo sapiens
aauuugaggaacuucccacuu

SEQ ID NO: 229 - RNA, 21 nt, Homo sapiens
guuguauuucucgaccaaauu

SEQ ID NO: 230 - RNA, 21 nt, Homo sapiens
uuuggucgagaaauacaacuu

SEQ ID NO: 231 - RNA, 21 nt, Homo sapiens
gaaauguucccgcugcaaauu

SEQ ID NO: 232 - RNA, 21 nt, Homo sapiens
uuugcagcgggaacauuucuu

SEQ ID NO: 233 - RNA, 21 nt, Homo sapiens
uagauuucugacccaaguauu

SEQ ID NO: 234 - RNA, 21 nt, Homo sapiens
uacuugggucagaaaucuauu

SEQ ID NO: 235 - RNA, 21 nt, Homo sapiens
gaaauguucccgcugcaaauu

SEQ ID NO: 236 - RNA, 21 nt, Homo sapiens
uuugcagcgggaacauuucuu

SEQ ID NO: 237 - RNA, 21 nt, Homo sapiens
caaguucgcaugagugauuuu

SEQ ID NO: 238 - RNA, 21 nt, Homo sapiens
aaucacucaugcgaacuuguu

SEQ ID NO: 239 - RNA, 21 nt, Homo sapiens
ucgaguuccuccuucagaauu

SEQ ID NO: 240 - RNA, 21 nt, Homo sapiens
uucugaaggaggaacucgauu

SEQ ID NO: 241 - RNA, 21 nt, Homo sapiens
cacacauagcucugaagaauu

SEQ ID NO: 242 - RNA, 21 nt, Homo sapiens
uucuucagagcuauguguguu

SEQ ID NO: 243 - RNA, 21 nt, Homo sapiens
gaaauuucucgauguuuaauu

SEQ ID NO: 244 - RNA, 21 nt, Homo sapiens
uuaaacaucgagaaauuucuu

SEQ ID NO: 245 - RNA, 21 nt, Homo sapiens
aacgcaucuucugaaagauuu

SEQ ID NO: 246 - RNA, 21 nt, Homo sapiens
aucuuucagaagaugcguuuu

SEQ ID NO: 247 - RNA, 21 nt, Homo sapiens
ccugaaauuucucgauguuuu

SEQ ID NO: 248 - RNA, 21 nt, Homo sapiens
aacaucgagaaauuucagguu

SEQ ID NO: 249 - RNA, 21 nt, Homo sapiens
ggagucuggacguaaauauuu

SEQ ID NO: 250 - RNA, 21 nt, Homo sapiens
auauuuacguccagacuccuu

SEQ ID NO: 251 - RNA, 21 nt, Homo sapiens
cgccuuuggcugaguauaauu

SEQ ID NO: 252 - RNA, 21 nt, Homo sapiens
uuauacucagccaaaggcguu

SEQ ID NO: 253 - RNA, 21 nt, Homo sapiens
gccuuuggcugaguauaaauu

SEQ ID NO: 254 - RNA, 21 nt, Homo sapiens
uuuauacucagccaaaggcuu

SEQ ID NO: 255 - RNA, 21 nt, Homo sapiens
aaacgcaucuucugaaagauu

SEQ ID NO: 256 - RNA, 21 nt, Homo sapiens
ucuuucagaagaugcguuuuu

SEQ ID NO: 257 - DNA, 19 bp, Homo sapiens
ataggttattggtgtcaaa

SEQ ID NO: 258 - DNA, 19 bp, Homo sapiens
ctacgtccttagaaattta

SEQ ID NO: 259 - DNA, 19 bp, Homo sapiens
tgcattatcctataggtta

SEQ ID NO: 260 - DNA, 19 bp, Homo sapiens
gacatctcctcatgaatat

SEQ ID NO: 261 - DNA, 19 bp, Homo sapiens
gaatcagctccttgtcaaa

SEQ ID NO: 262 - DNA, 19 bp, Homo sapiens
ctgtaatcctgctgaacaa

SEQ ID NO: 263 - DNA, 19 bp, Homo sapiens
gggtcatcgtcatcacaat

SEQ ID NO: 264 - DNA, 19 bp, Homo sapiens
tgcttccaccagtgagata

SEQ ID NO: 265 - DNA, 19 bp, Homo sapiens
gtagtaatctgtagagtta

SEQ ID NO: 266 - DNA, 19 bp, Homo sapiens
cgaagtttggtcaaatata

SEQ ID NO: 267 - DNA, 19 bp, Homo sapiens
ggattgatctgtgtaacta

SEQ ID NO: 268 - DNA, 19 bp, Homo sapiens
tgagtagtatctctgagta

SEQ ID NO: 269 - DNA, 19 bp, Homo sapiens
gcatagcaatcctgagaaa

SEQ ID NO: 270 - DNA, 19 bp, Homo sapiens
cgtagtaatctgtagagtt

SEQ ID NO: 271 - DNA, 19 bp, Homo sapiens
gaaagtatttctgagtagt

SEQ ID NO: 272 - DNA, 19 bp, Homo sapiens
ctgacttgctcttagagat

SEQ ID NO: 273 - DNA, 19 bp, Homo sapiens
gggattcttgcagaacgaa

SEQ ID NO: 274 - DNA, 19 bp, Homo sapiens
gcagaaataacatgttaga

SEQ ID NO: 275 - DNA, 19 bp, Homo sapiens
gggaaatactgaaagtatt

SEQ ID NO: 276 - DNA, 19 bp, Homo sapiens
ggtttgtactggaaggata

SEQ ID NO: 277 - DNA, 19 bp, Homo sapiens
gcgaacttcttagaaatga

SEQ ID NO: 278 - DNA, 19 bp, Homo sapiens
agggaaatgtcagttggaa

SEQ ID NO: 279 - DNA, 19 bp, Homo sapiens
gatttggatttgtgacata

SEQ ID NO: 280 - DNA, 19 bp, Homo sapiens
ggtatggactctctaaatt

SEQ ID NO: 281 - DNA, 19 bp, Homo sapiens
ggaaatgtcagttggaatc

SEQ ID NO: 282 - DNA, 19 bp, Homo sapiens
acaaactttgcttgaagat

SEQ ID NO: 283 - DNA, 19 bp, Homo sapiens
gcagtatgatgatagaagt

SEQ ID NO: 284 - DNA, 19 bp, Homo sapiens
gagtaagagcgacgattta

SEQ ID NO: 285 - DNA, 19 bp, Homo sapiens
gataaagtttcatggtact

SEQ ID NO: 286 - DNA, 19 bp, Homo sapiens
tggtttaacttgagagcaa

SEQ ID NO: 287 - DNA, 19 bp, Homo sapiens
acagtcagcacttgataaa

SEQ ID NO: 288 - DNA, 19 bp, Homo sapiens
ctgtatagctgatgataaa

SEQ ID NO: 289 - DNA, 19 bp, Homo sapiens
ggtttaacttgagagcaaa

SEQ ID NO: 290 - DNA, 19 bp, Homo sapiens
gtcagcacttgataaatat

SEQ ID NO: 291 - DNA, 19 bp, Homo sapiens
caattgatatcaggttcaa

SEQ ID NO: 292 - DNA, 19 bp, Homo sapiens
aaagaaatcctgggctgaa

SEQ ID NO: 293 - DNA, 19 bp, Homo sapiens
gcattacctgatggagatt

SEQ ID NO: 294 - DNA, 19 bp, Homo sapiens
ataggttattggtgtcaaa

SEQ ID NO: 295 - DNA, 19 bp, Homo sapiens
ctacgtccttagaaattta

SEQ ID NO: 296 - DNA, 19 bp, Homo sapiens
tgcattatcctataggtta

SEQ ID NO: 297 - DNA, 19 bp, Homo sapiens
gacatctcctcatgaatat

SEQ ID NO: 298 - DNA, 19 bp, Homo sapiens
gaatcagctccttgtcaaa

SEQ ID NO: 299 - DNA, 19 bp, Homo sapiens
ctgtaatcctgctgaacaa

SEQ ID NO: 300 - DNA, 19 bp, Homo sapiens
gggtcatcgtcatcacaat

SEQ ID NO: 301 - DNA, 19 bp, Homo sapiens
tgcttccaccagtgagata

SEQ ID NO: 302 - DNA, 19 bp, Homo sapiens
gtagtaatctgtagagtta

SEQ ID NO: 303 - DNA, 19 bp, Homo sapiens
cgaagtttggtcaaatata

SEQ ID NO: 304 - DNA, 19 bp, Homo sapiens
ggattgatctgtgtaacta

SEQ ID NO: 305 - DNA, 19 bp, Homo sapiens
tgagtagtatctctgagta

SEQ ID NO: 306 - DNA, 19 bp, Homo sapiens
gcatagcaatcctgagaaa

SEQ ID NO: 307 - DNA, 19 bp, Homo sapiens
cgtagtaatctgtagagtt

SEQ ID NO: 308 - DNA, 19 bp, Homo sapiens
gaaagtatttctgagtagt

SEQ ID NO: 309 - RNA, 19 nt, Homo sapiens
auagguuauuggugucaaa

SEQ ID NO: 310 - RNA, 19 nt, Homo sapiens
uuugacaccaauaaccuau

SEQ ID NO: 311 - RNA, 19 nt, Homo sapiens
cuacguccuuagaaauuua

SEQ ID NO: 312 - RNA, 19 nt, Homo sapiens
uaaauuucuaaggacguag

SEQ ID NO: 313 - RNA, 19 nt, Homo sapiens
ugcauuauccuauagguua

SEQ ID NO: 314 - RNA, 19 nt, Homo sapiens
uaaccuauaggauaaugca

SEQ ID NO: 315 - RNA, 19 nt, Homo sapiens
gacaucuccucaugaauau

SEQ ID NO: 316 - RNA, 19 nt, Homo sapiens
auauucaugaggagauguc

SEQ ID NO: 317 - RNA, 19 nt, Homo sapiens
gaaucagcuccuugucaaa

SEQ ID NO: 318 - RNA, 19 nt, Homo sapiens
uuugacaaggagcugauuc

SEQ ID NO: 319 - RNA, 19 nt, Homo sapiens
cuguaauccugcugaacaa

SEQ ID NO: 320 - RNA, 19 nt, Homo sapiens
uuguucagcaggauuacag

SEQ ID NO: 321 - RNA, 19 nt, Homo sapiens
gggucaucgucaucacaau

SEQ ID NO: 322 - RNA, 19 nt, Homo sapiens
auugugaugacgaugaccc

SEQ ID NO: 323 - RNA, 19 nt, Homo sapiens
ugcuuccaccagugagaua

SEQ ID NO: 324 - RNA, 19 nt, Homo sapiens
uaucucacugguggaagca

SEQ ID NO: 325 - RNA, 19 nt, Homo sapiens
guaguaaucuguagaguua

SEQ ID NO: 326 - RNA, 19 nt, Homo sapiens
uaacucuacagauuacuac

SEQ ID NO: 327 - RNA, 19 nt, Homo sapiens
cgaaguuuggucaaauaua

SEQ ID NO: 328 - RNA, 19 nt, Homo sapiens
uauauuugaccaaacuucg

SEQ ID NO: 329 - RNA, 19 nt, Homo sapiens
ggauugaucuguguaacua

SEQ ID NO: 330 - RNA, 19 nt, Homo sapiens
uaguuacacagaucaaucc

SEQ ID NO: 331 - RNA, 19 nt, Homo sapiens
ugaguaguaucucugagua

SEQ ID NO: 332 - RNA, 19 nt, Homo sapiens
uacucagagauacuacuca

SEQ ID NO: 333 - RNA, 19 nt, Homo sapiens
gcauagcaauccugagaaa

SEQ ID NO: 334 - RNA, 19 nt, Homo sapiens
uuucucaggauugcuaugc

SEQ ID NO: 335 - RNA, 19 nt, Homo sapiens
cguaguaaucuguagaguu

SEQ ID NO: 336 - RNA, 19 nt, Homo sapiens
aacucuacagauuacuacg

SEQ ID NO: 337 - RNA, 19 nt, Homo sapiens
gaaaguauuucugaguagu

SEQ ID NO: 338 - RNA, 19 nt, Homo sapiens
acuacucagaaauacuuuc

SEQ ID NO: 339 - RNA, 19 nt, Homo sapiens
cugacuugcucuuagagau

SEQ ID NO: 340 - RNA, 19 nt, Homo sapiens
aucucuaagagcaagucag

SEQ ID NO: 341 - RNA, 19 nt, Homo sapiens
gggauucuugcagaacgaa

SEQ ID NO: 342 - RNA, 19 nt, Homo sapiens
uucguucugcaagaauccc

SEQ ID NO: 343 - RNA, 19 nt, Homo sapiens
gcagaaauaacauguuaga

SEQ ID NO: 344 - RNA, 19 nt, Homo sapiens
ucuaacauguuauuucugc

SEQ ID NO: 345 - RNA, 19 nt, Homo sapiens
gggaaauacugaaaguauu

SEQ ID NO: 346 - RNA, 19 nt, Homo sapiens
aauacuuucaguauuuccc

SEQ ID NO: 347 - RNA, 19 nt, Homo sapiens
gguuuguacuggaaggaua

SEQ ID NO: 348 - RNA, 19 nt, Homo sapiens
uauccuuccaguacaaacc

SEQ ID NO: 349 - RNA, 19 nt, Homo sapiens
gcgaacuucuuagaaauga

SEQ ID NO: 350 - RNA, 19 nt, Homo sapiens
ucauuucuaagaaguucgc

SEQ ID NO: 351 - RNA, 19 nt, Homo sapiens
agggaaaugucaguuggaa

SEQ ID NO: 352 - RNA, 19 nt, Homo sapiens
uuccaacugacauuucccu

SEQ ID NO: 353 - RNA, 19 nt, Homo sapiens
gauuuggauuugugacaua

SEQ ID NO: 354 - RNA, 19 nt, Homo sapiens
uaugucacaaauccaaauc

SEQ ID NO: 355 - RNA, 19 nt, Homo sapiens
gguauggacucucuaaauu

SEQ ID NO: 356 - RNA, 19 nt, Homo sapiens
aauuuagagaguccauacc

SEQ ID NO: 357 - RNA, 19 nt, Homo sapiens
ggaaaugucaguuggaauc

SEQ ID NO: 358 - RNA, 19 nt, Homo sapiens
gauuccaacugacauuucc

SEQ ID NO: 359 - RNA, 19 nt, Homo sapiens
acaaacuuugcuugaagau

SEQ ID NO: 360 - RNA, 19 nt, Homo sapiens
aucuucaagcaaaguuugu

SEQ ID NO: 361 - RNA, 19 nt, Homo sapiens
gcaguaugaugauagaagu

SEQ ID NO: 362 - RNA, 19 nt, Homo sapiens
acuucuaucaucauacugc

SEQ ID NO: 363 - RNA, 19 nt, Homo sapiens
gaguaagagcgacgauuua

SEQ ID NO: 364 - RNA, 19 nt, Homo sapiens
uaaaucgucgcucuuacuc

SEQ ID NO: 365 - RNA, 19 nt, Homo sapiens
gauaaaguuucaugguacu

SEQ ID NO: 366 - RNA, 19 nt, Homo sapiens
aguaccaugaaacuuuauc

SEQ ID NO: 367 - RNA, 19 nt, Homo sapiens
ugguuuaacuugagagcaa

SEQ ID NO: 368 - RNA, 19 nt, Homo sapiens
uugcucucaaguuaaacca

SEQ ID NO: 369 - RNA, 19 nt, Homo sapiens
acagucagcacuugauaaa

SEQ ID NO: 370 - RNA, 19 nt, Homo sapiens
uuuaucaagugcugacugu

SEQ ID NO: 371 - RNA, 19 nt, Homo sapiens
cuguauagcugaugauaaa

SEQ ID NO: 372 - RNA, 19 nt, Homo sapiens
uuuaucaucagcuauacag

SEQ ID NO: 373 - RNA, 19 nt, Homo sapiens
gguuuaacuugagagcaaa

SEQ ID NO: 374 - RNA, 19 nt, Homo sapiens
uuugcucucaaguuaaacc

SEQ ID NO: 375 - RNA, 19 nt, Homo sapiens
gucagcacuugauaaauau

SEQ ID NO: 376 - RNA, 19 nt, Homo sapiens
auauuuaucaagugcugac

SEQ ID NO: 377 - RNA, 19 nt, Homo sapiens
caauugauaucagguucaa

SEQ ID NO: 378 - RNA, 19 nt, Homo sapiens
uugaaccugauaucaauug

SEQ ID NO: 379 - RNA, 19 nt, Homo sapiens
aaagaaauccugggcugaa

SEQ ID NO: 380 - RNA, 19 nt, Homo sapiens
uucagcccaggauuucuuu

SEQ ID NO: 381 - RNA, 19 nt, Homo sapiens
gcauuaccugauggagauu

SEQ ID NO: 382 - RNA, 19 nt, Homo sapiens
aaucuccaucagguaaugc

SEQ ID NO: 383 - RNA, 19 nt, Homo sapiens
auagguuauuggugucaaa

SEQ ID NO: 384 - RNA, 19 nt, Homo sapiens
uuugacaccaauaaccuau

SEQ ID NO: 385 - RNA, 19 nt, Homo sapiens
cuacguccuuagaaauuua

SEQ ID NO: 386 - RNA, 19 nt, Homo sapiens
uaaauuucuaaggacguag

SEQ ID NO: 387 - RNA, 19 nt, Homo sapiens
ugcauuauccuauagguua

SEQ ID NO: 388 - RNA, 19 nt, Homo sapiens
uaaccuauaggauaaugca

SEQ ID NO: 389 - RNA, 19 nt, Homo sapiens
gacaucuccucaugaauau

SEQ ID NO: 390 - RNA, 19 nt, Homo sapiens
auauucaugaggagauguc

SEQ ID NO: 391 - RNA, 19 nt, Homo sapiens
gaaucagcuccuugucaaa

SEQ ID NO: 392 - RNA, 19 nt, Homo sapiens
uuugacaaggagcugauuc

SEQ ID NO: 393 - RNA, 19 nt, Homo sapiens
cuguaauccugcugaacaa

SEQ ID NO: 394 - RNA, 19 nt, Homo sapiens
uuguucagcaggauuacag

SEQ ID NO: 395 - RNA, 19 nt, Homo sapiens
gggucaucgucaucacaau

SEQ ID NO: 396 - RNA, 19 nt, Homo sapiens
auugugaugacgaugaccc

SEQ ID NO: 397 - RNA, 19 nt, Homo sapiens
ugcuuccaccagugagaua

SEQ ID NO: 398 - RNA, 19 nt, Homo sapiens
uaucucacugguggaagca

SEQ ID NO: 399 - RNA, 19 nt, Homo sapiens
guaguaaucuguagaguua

SEQ ID NO: 400 - RNA, 19 nt, Homo sapiens
uaacucuacagauuacuac

SEQ ID NO: 401 - RNA, 19 nt, Homo sapiens
cgaaguuuggucaaauaua

SEQ ID NO: 402 - RNA, 19 nt, Homo sapiens
uauauuugaccaaacuucg

SEQ ID NO: 403 - RNA, 19 nt, Homo sapiens
ggauugaucuguguaacua

SEQ ID NO: 404 - RNA, 19 nt, Homo sapiens
uaguuacacagaucaaucc

SEQ ID NO: 405 - RNA, 19 nt, Homo sapiens
ugaguaguaucucugagua

SEQ ID NO: 406 - RNA, 19 nt, Homo sapiens
uacucagagauacuacuca

SEQ ID NO: 407 - RNA, 19 nt, Homo sapiens
gcauagcaauccugagaaa

SEQ ID NO: 408 - RNA, 19 nt, Homo sapiens
uuucucaggauugcuaugc

SEQ ID NO: 409 - RNA, 19 nt, Homo sapiens
cguaguaaucuguagaguu

SEQ ID NO: 410 - RNA, 19 nt, Homo sapiens
aacucuacagauuacuacg

SEQ ID NO: 411 - RNA, 19 nt, Homo sapiens
gaaaguauuucugaguagu

SEQ ID NO: 412 - RNA, 19 nt, Homo sapiens
acuacucagaaauacuuuc

SEQ ID NO: 413 - RNA, 21 nt, Homo sapiens
auagguuauuggugucaaauu

SEQ ID NO: 414 - RNA, 21 nt, Homo sapiens
uuugacaccaauaaccuauuu

SEQ ID NO: 415 - RNA, 21 nt, Homo sapiens
cuacguccuuagaaauuuauu

SEQ ID NO: 416 - RNA, 21 nt, Homo sapiens
uaaauuucuaaggacguaguu

SEQ ID NO: 417 - RNA, 21 nt, Homo sapiens
ugcauuauccuauagguuauu

SEQ ID NO: 418 - RNA, 21 nt, Homo sapiens
uaaccuauaggauaaugcauu

SEQ ID NO: 419 - RNA, 21 nt, Homo sapiens
gacaucuccucaugaauauuu

SEQ ID NO: 420 - RNA, 21 nt, Homo sapiens
auauucaugaggagaugucuu

SEQ ID NO: 421 - RNA, 21 nt, Homo sapiens
gaaucagcuccuugucaaauu

SEQ ID NO: 422 - RNA, 21 nt, Homo sapiens
uuugacaaggagcugauucuu

SEQ ID NO: 423 - RNA, 21 nt, Homo sapiens
cuguaauccugcugaacaauu

SEQ ID NO: 424 - RNA, 21 nt, Homo sapiens
uuguucagcaggauuacaguu

SEQ ID NO: 425 - RNA, 21 nt, Homo sapiens
gggucaucgucaucacaauuu

SEQ ID NO: 426 - RNA, 21 nt, Homo sapiens
auugugaugacgaugacccuu

SEQ ID NO: 427 - RNA, 21 nt, Homo sapiens
ugcuuccaccagugagauauu

SEQ ID NO: 428 - RNA, 21 nt, Homo sapiens
uaucucacugguggaagcauu

SEQ ID NO: 429 - RNA, 21 nt, Homo sapiens
guaguaaucuguagaguuauu

SEQ ID NO: 430 - RNA, 21 nt, Homo sapiens
uaacucuacagauuacuacuu

SEQ ID NO: 431 - RNA, 21 nt, Homo sapiens
cgaaguuuggucaaauauauu

SEQ ID NO: 432 - RNA, 21 nt, Homo sapiens
uauauuugaccaaacuucguu

SEQ ID NO: 433 - RNA, 21 nt, Homo sapiens
ggauugaucuguguaacuauu

SEQ ID NO: 434 - RNA, 21 nt, Homo sapiens
uaguuacacagaucaauccuu

SEQ ID NO: 435 - RNA, 21 nt, Homo sapiens
ugaguaguaucucugaguauu

SEQ ID NO: 436 - RNA, 21 nt, Homo sapiens
uacucagagauacuacucauu

SEQ ID NO: 437 - RNA, 21 nt, Homo sapiens
gcauagcaauccugagaaauu

SEQ ID NO: 438 - RNA, 21 nt, Homo sapiens
uuucucaggauugcuaugcuu

SEQ ID NO: 439 - RNA, 21 nt, Homo sapiens
cguaguaaucuguagaguuuu

SEQ ID NO: 440 - RNA, 21 nt, Homo sapiens
aacucuacagauuacuacguu

SEQ ID NO: 441 - RNA, 21 nt, Homo sapiens
gaaaguauuucugaguaguuu

SEQ ID NO: 442 - RNA, 21 nt, Homo sapiens
acuacucagaaauacuuucuu

SEQ ID NO: 443 - RNA, 21 nt, Homo sapiens
cugacuugcucuuagagauuu

SEQ ID NO: 444 - RNA, 21 nt, Homo sapiens
aucucuaagagcaagucaguu

SEQ ID NO: 445 - RNA, 21 nt, Homo sapiens
gggauucuugcagaacgaauu

SEQ ID NO: 446 - RNA, 21 nt, Homo sapiens
uucguucugcaagaaucccuu

SEQ ID NO: 447 - RNA, 21 nt, Homo sapiens
gcagaaauaacauguuagauu

SEQ ID NO: 448 - RNA, 21 nt, Homo sapiens
ucuaacauguuauuucugcuu

SEQ ID NO: 449 - RNA, 21 nt, Homo sapiens
gggaaauacugaaaguauuuu

SEQ ID NO: 450 - RNA, 21 nt, Homo sapiens
aauacuuucaguauuucccuu

SEQ ID NO: 451 - RNA, 21 nt, Homo sapiens
gguuuguacuggaaggauauu

SEQ ID NO: 452 - RNA, 21 nt, Homo sapiens
uauccuuccaguacaaaccuu

SEQ ID NO: 453 - RNA, 21 nt, Homo sapiens
gcgaacuucuuagaaaugauu

SEQ ID NO: 454 - RNA, 21 nt, Homo sapiens
ucauuucuaagaaguucgcuu

SEQ ID NO: 455 - RNA, 21 nt, Homo sapiens
agggaaaugucaguuggaauu

SEQ ID NO: 456 - RNA, 21 nt, Homo sapiens
uuccaacugacauuucccuuu

SEQ ID NO: 457 - RNA, 21 nt, Homo sapiens
gauuuggauuugugacauauu

SEQ ID NO: 458 - RNA, 21 nt, Homo sapiens
uaugucacaaauccaaaucuu

SEQ ID NO: 459 - RNA, 21 nt, Homo sapiens
gguauggacucucuaaauuuu

SEQ ID NO: 460 - RNA, 21 nt, Homo sapiens
aauuuagagaguccauaccuu

SEQ ID NO: 461 - RNA, 21 nt, Homo sapiens
ggaaaugucaguuggaaucuu

SEQ ID NO: 462 - RNA, 21 nt, Homo sapiens
gauuccaacugacauuuccuu

SEQ ID NO: 463 - RNA, 21 nt, Homo sapiens
acaaacuuugcuugaagauuu

SEQ ID NO: 464 - RNA, 21 nt, Homo sapiens
aucuucaagcaaaguuuguuu

SEQ ID NO: 465 - RNA, 21 nt, Homo sapiens
gcaguaugaugauagaaguuu

SEQ ID NO: 466 - RNA, 21 nt, Homo sapiens
acuucuaucaucauacugcuu

SEQ ID NO: 467 - RNA, 21 nt, Homo sapiens
gaguaagagcgacgauuuauu

SEQ ID NO: 468 - RNA, 21 nt, Homo sapiens
uaaaucgucgcucuuacucuu

SEQ ID NO: 469 - RNA, 21 nt, Homo sapiens
gauaaaguuucaugguacuuu

SEQ ID NO: 470 - RNA, 21 nt, Homo sapiens
aguaccaugaaacuuuaucuu

SEQ ID NO: 471 - RNA, 21 nt, Homo sapiens
ugguuuaacuugagagcaauu

SEQ ID NO: 472 - RNA, 21 nt, Homo sapiens
uugcucucaaguuaaaccauu

SEQ ID NO: 473 - RNA, 21 nt, Homo sapiens
acagucagcacuugauaaauu

SEQ ID NO: 474 - RNA, 21 nt, Homo sapiens
uuuaucaagugcugacuguuu

SEQ ID NO: 475 - RNA, 21 nt, Homo sapiens
cuguauagcugaugauaaauu

SEQ ID NO: 476 - RNA, 21 nt, Homo sapiens
uuuaucaucagcuauacaguu

SEQ ID NO: 477 - RNA, 21 nt, Homo sapiens
gguuuaacuugagagcaaauu

SEQ ID NO: 478 - RNA, 21 nt, Homo sapiens
uuugcucucaaguuaaaccuu

SEQ ID NO: 479 - RNA, 21 nt, Homo sapiens
gucagcacuugauaaauauuu

SEQ ID NO: 480 - RNA, 21 nt, Homo sapiens
auauuuaucaagugcugacuu

SEQ ID NO: 481 - RNA, 21 nt, Homo sapiens
caauugauaucagguucaauu

SEQ ID NO: 482 - RNA, 21 nt, Homo sapiens
uugaaccugauaucaauuguu

SEQ ID NO: 483 - RNA, 21 nt, Homo sapiens
aaagaaauccugggcugaauu

SEQ ID NO: 484 - RNA, 21 nt, Homo sapiens
uucagcccaggauuucuuuuu

SEQ ID NO: 485 - RNA, 21 nt, Homo sapiens
gcauuaccugauggagauuuu

SEQ ID NO: 486 - RNA, 21 nt, Homo sapiens
aaucuccaucagguaaugcuu

SEQ ID NO: 487 - RNA, 21 nt, Homo sapiens
auagguuauuggugucaaauu

SEQ ID NO: 488 - RNA, 21 nt, Homo sapiens
uuugacaccaauaaccuauuu

SEQ ID NO: 489 - RNA, 21 nt, Homo sapiens
cuacguccuuagaaauuuauu

SEQ ID NO: 490 - RNA, 21 nt, Homo sapiens
uaaauuucuaaggacguaguu

SEQ ID NO: 491 - RNA, 21 nt, Homo sapiens
ugcauuauccuauagguuauu

SEQ ID NO: 492 - RNA, 21 nt, Homo sapiens
uaaccuauaggauaaugcauu

SEQ ID NO: 493 - RNA, 21 nt, Homo sapiens
gacaucuccucaugaauauuu

SEQ ID NO: 494 - RNA, 21 nt, Homo sapiens
auauucaugaggagaugucuu

SEQ ID NO: 495 - RNA, 21 nt, Homo sapiens
gaaucagcuccuugucaaauu

SEQ ID NO: 496 - RNA, 21 nt, Homo sapiens
uuugacaaggagcugauucuu

SEQ ID NO: 497 - RNA, 21 nt, Homo sapiens
cuguaauccugcugaacaauu

SEQ ID NO: 498 - RNA, 21 nt, Homo sapiens
uuguucagcaggauuacaguu

SEQ ID NO: 499 - RNA, 21 nt, Homo sapiens
gggucaucgucaucacaauuu

SEQ ID NO: 500 - RNA, 21 nt, Homo sapiens
auugugaugacgaugacccuu

SEQ ID NO: 501 - RNA, 21 nt, Homo sapiens
ugcuuccaccagugagauauu

SEQ ID NO: 502 - RNA, 21 nt, Homo sapiens
uaucucacugguggaagcauu

SEQ ID NO: 503 - RNA, 21 nt, Homo sapiens
guaguaaucuguagaguuauu

SEQ ID NO: 504 - RNA, 21 nt, Homo sapiens
uaacucuacagauuacuacuu

SEQ ID NO: 505 - RNA, 21 nt, Homo sapiens
cgaaguuuggucaaauauauu

SEQ ID NO: 506 - RNA, 21 nt, Homo sapiens
uauauuugaccaaacuucguu

SEQ ID NO: 507 - RNA, 21 nt, Homo sapiens
ggauugaucuguguaacuauu

SEQ ID NO: 508 - RNA, 21 nt, Homo sapiens
uaguuacacagaucaauccuu

SEQ ID NO: 509 - RNA, 21 nt, Homo sapiens
ugaguaguaucucugaguauu

SEQ ID NO: 510 - RNA, 21 nt, Homo sapiens
uacucagagauacuacucauu

SEQ ID NO: 511 - RNA, 21 nt, Homo sapiens
gcauagcaauccugagaaauu

SEQ ID NO: 512 - RNA, 21 nt, Homo sapiens
uuucucaggauugcuaugcuu

SEQ ID NO: 513 - RNA, 21 nt, Homo sapiens
cguaguaaucuguagaguuuu

SEQ ID NO: 514 - RNA, 21 nt, Homo sapiens
aacucuacagauuacuacguu

SEQ ID NO: 515 - RNA, 21 nt, Homo sapiens
gaaaguauuucugaguaguuu

SEQ ID NO: 516 - RNA, 21 nt, Homo sapiens
acuacucagaaauacuuucuu

SEQ ID NO: 517 - DNA, 19 bp, Homo sapiens
ctcagatatttccgaatta

SEQ ID NO: 518 - DNA, 19 bp, Homo sapiens
gaggttaagctgtgaaata

SEQ ID NO: 519 - DNA, 19 bp, Homo sapiens
ggttaagctgtgaaatact

SEQ ID NO: 520 - DNA, 19 bp, Homo sapiens
tggaggttaagctgtgaaa

SEQ ID NO: 521 - DNA, 19 bp, Homo sapiens
tccgaggagtcggataatt

SEQ ID NO: 522 - DNA, 19 bp, Homo sapiens
tcagatatttccgaattac

SEQ ID NO: 523 - DNA, 19 bp, Homo sapiens
agatatttggactgatgca

SEQ ID NO: 524 - DNA, 19 bp, Homo sapiens
gtccgaggagtcggataat

SEQ ID NO: 525 - DNA, 19 bp, Homo sapiens
cacagatatttggactgat

SEQ ID NO: 526 - RNA, 19 nt, Homo sapiens
cucagauauuuccgaauua

SEQ ID NO: 527 - RNA, 19 nt, Homo sapiens
uaauucggaaauaucugag

SEQ ID NO: 528 - RNA, 19 nt, Homo sapiens
gagguuaagcugugaaaua

SEQ ID NO: 529 - RNA, 19 nt, Homo sapiens
uauuucacagcuuaaccuc

SEQ ID NO: 530 - RNA, 19 nt, Homo sapiens
gguuaagcugugaaauacu

SEQ ID NO: 531 - RNA, 19 nt, Homo sapiens
aguauuucacagcuuaacc

SEQ ID NO: 532 - RNA, 19 nt, Homo sapiens
uggagguuaagcugugaaa

SEQ ID NO: 533 - RNA, 19 nt, Homo sapiens
uuucacagcuuaaccucca

SEQ ID NO: 534 - RNA, 19 nt, Homo sapiens
uccgaggagucggauaauu

SEQ ID NO: 535 - RNA, 19 nt, Homo sapiens
aauuauccgacuccucgga

SEQ ID NO: 536 - RNA, 19 nt, Homo sapiens
ucagauauuuccgaauuac

SEQ ID NO: 537 - RNA, 19 nt, Homo sapiens
guaauucggaaauaucuga

SEQ ID NO: 538 - RNA, 19 nt, Homo sapiens
agauauuuggacugaugca

SEQ ID NO: 539 - RNA, 19 nt, Homo sapiens
ugcaucaguccaaauaucu

SEQ ID NO: 540 - RNA, 19 nt, Homo sapiens
guccgaggagucggauaau

SEQ ID NO: 541 - RNA, 19 nt, Homo sapiens
auuauccgacuccucggac

SEQ ID NO: 542 - RNA, 19 nt, Homo sapiens
cacagauauuuggacugau

SEQ ID NO: 543 - RNA, 19 nt, Homo sapiens
aucaguccaaauaucugug

SEQ ID NO: 544 - RNA, 21 nt, Homo sapiens
cucagauauuuccgaauuauu

SEQ ID NO: 545 - RNA, 21 nt, Homo sapiens
uaauucggaaauaucugaguu

SEQ ID NO: 546 - RNA, 21 nt, Homo sapiens
gagguuaagcugugaaauauu

SEQ ID NO: 547 - RNA, 21 nt, Homo sapiens
uauuucacagcuuaaccucuu

SEQ ID NO: 548 - RNA, 21 nt, Homo sapiens
gguuaagcugugaaauacuuu

SEQ ID NO: 549 - RNA, 21 nt, Homo sapiens
aguauuucacagcuuaaccuu

SEQ ID NO: 550 - RNA, 21 nt, Homo sapiens
uggagguuaagcugugaaauu

SEQ ID NO: 551 - RNA, 21 nt, Homo sapiens
uuucacagcuuaaccuccauu

SEQ ID NO: 552 - RNA, 21 nt, Homo sapiens
uccgaggagucggauaauuuu

SEQ ID NO: 553 - RNA, 21 nt, Homo sapiens
aauuauccgacuccucggauu

SEQ ID NO: 554 - RNA, 21 nt, Homo sapiens
ucagauauuuccgaauuacuu

SEQ ID NO: 555 - RNA, 21 nt, Homo sapiens
guaauucggaaauaucugauu

SEQ ID NO: 556 - RNA, 21 nt, Homo sapiens
agauauuuggacugaugcauu

SEQ ID NO: 557 - RNA, 21 nt, Homo sapiens
ugcaucaguccaaauaucuuu

SEQ ID NO: 558 - RNA, 21 nt, Homo sapiens
guccgaggagucggauaauuu

SEQ ID NO: 559 - RNA, 21 nt, Homo sapiens
auuauccgacuccucggacuu

SEQ ID NO: 560 - RNA, 21 nt, Homo sapiens
cacagauauuuggacugauuu

SEQ ID NO: 561 - RNA, 21 nt, Homo sapiens
aucaguccaaauaucuguguu

SEQ ID NO: 562 - DNA, 19 bp, Homo sapiens
tgagataatctgtgttaga

SEQ ID NO: 563 - DNA, 19 bp, Homo sapiens
gatgatgtccgataagcaa

SEQ ID NO: 564 - DNA, 19 bp, Homo sapiens
tagacttactcctagatat

SEQ ID NO: 565 - DNA, 19 bp, Homo sapiens
gtgttaatctggaggaaca

SEQ ID NO: 566 - DNA, 19 bp, Homo sapiens
agtaaatctctttgagcta

SEQ ID NO: 567 - DNA, 19 bp, Homo sapiens
atgaattgctatcagtaaa

SEQ ID NO: 568 - DNA, 19 bp, Homo sapiens
agacttactcctagatatc

SEQ ID NO: 569 - DNA, 19 bp, Homo sapiens
ggagtttgcatggaaatca

SEQ ID NO: 570 - DNA, 19 bp, Homo sapiens
tggtgggttgccgataaat

SEQ ID NO: 571 - DNA, 19 bp, Homo sapiens
gtgggttgccgataaatgt

SEQ ID NO: 572 - DNA, 19 bp, Homo sapiens
aaatgtcagatgtgttaat

SEQ ID NO: 573 - DNA, 19 bp, Homo sapiens
atgtcatttatgtgagtaa

SEQ ID NO: 574 - DNA, 19 bp, Homo sapiens
gagagaatctgtcaatttg

SEQ ID NO: 575 - DNA, 19 bp, Homo sapiens
ctatatcactaatgagtta

SEQ ID NO: 576 - DNA, 19 bp, Homo sapiens
tggactaagagatgttaat

SEQ ID NO: 577 - RNA, 19 nt, Homo sapiens
ugagauaaucuguguuaga

SEQ ID NO: 578 - RNA, 19 nt, Homo sapiens
ucuaacacagauuaucuca

SEQ ID NO: 579 - RNA, 19 nt, Homo sapiens
gaugauguccgauaagcaa

SEQ ID NO: 580 - RNA, 19 nt, Homo sapiens
uugcuuaucggacaucauc

SEQ ID NO: 581 - RNA, 19 nt, Homo sapiens
uagacuuacuccuagauau

SEQ ID NO: 582 - RNA, 19 nt, Homo sapiens
auaucuaggaguaagucua

SEQ ID NO: 583 - RNA, 19 nt, Homo sapiens
guguuaaucuggaggaaca

SEQ ID NO: 584 - RNA, 19 nt, Homo sapiens
uguuccuccagauuaacac

SEQ ID NO: 585 - RNA, 19 nt, Homo sapiens
aguaaaucucuuugagcua

SEQ ID NO: 586 - RNA, 19 nt, Homo sapiens
uagcucaaagagauuuacu

SEQ ID NO: 587 - RNA, 19 nt, Homo sapiens
augaauugcuaucaguaaa

SEQ ID NO: 588 - RNA, 19 nt, Homo sapiens
uuuacugauagcaauucau

SEQ ID NO: 589 - RNA, 19 nt, Homo sapiens
agacuuacuccuagauauc

SEQ ID NO: 590 - RNA, 19 nt, Homo sapiens
gauaucuaggaguaagucu

SEQ ID NO: 591 - RNA, 19 nt, Homo sapiens
ggaguuugcauggaaauca

SEQ ID NO: 592 - RNA, 19 nt, Homo sapiens
ugauuuccaugcaaacucc

SEQ ID NO: 593 - RNA, 19 nt, Homo sapiens
ugguggguugccgauaaau

SEQ ID NO: 594 - RNA, 19 nt, Homo sapiens
auuuaucggcaacccacca

SEQ ID NO: 595 - RNA, 19 nt, Homo sapiens
guggguugccgauaaaugu

SEQ ID NO: 596 - RNA, 19 nt, Homo sapiens
acauuuaucggcaacccac

SEQ ID NO: 597 - RNA, 19 nt, Homo sapiens
aaaugucagauguguuaau

SEQ ID NO: 598 - RNA, 19 nt, Homo sapiens
auuaacacaucugacauuu

SEQ ID NO: 599 - RNA, 19 nt, Homo sapiens
augucauuuaugugaguaa

SEQ ID NO: 600 - RNA, 19 nt, Homo sapiens
uuacucacauaaaugacau

SEQ ID NO: 601 - RNA, 19 nt, Homo sapiens
gagagaaucugucaauuug

SEQ ID NO: 602 - RNA, 19 nt, Homo sapiens
caaauugacagauucucuc

SEQ ID NO: 603 - RNA, 19 nt, Homo sapiens
cuauaucacuaaugaguua

SEQ ID NO: 604 - RNA, 19 nt, Homo sapiens
uaacucauuagugauauag

SEQ ID NO: 605 - RNA, 19 nt, Homo sapiens
uggacuaagagauguuaau

SEQ ID NO: 606 - RNA, 19 nt, Homo sapiens
auuaacaucucuuagucca

SEQ ID NO: 607 - RNA, 21 nt, Homo sapiens
ugagauaaucuguguuagauu

SEQ ID NO: 608 - RNA, 21 nt, Homo sapiens
ucuaacacagauuaucucauu

SEQ ID NO: 609 - RNA, 21 nt, Homo sapiens
gaugauguccgauaagcaauu

SEQ ID NO: 610 - RNA, 21 nt, Homo sapiens
uugcuuaucggacaucaucuu

SEQ ID NO: 611 - RNA, 21 nt, Homo sapiens
uagacuuacuccuagauauuu

SEQ ID NO: 612 - RNA, 21 nt, Homo sapiens
auaucuaggaguaagucuauu

SEQ ID NO: 613 - RNA, 21 nt, Homo sapiens
guguuaaucuggaggaacauu

SEQ ID NO: 614 - RNA, 21 nt, Homo sapiens
uguuccuccagauuaacacuu

SEQ ID NO: 615 - RNA, 21 nt, Homo sapiens
aguaaaucucuuugagcuauu

SEQ ID NO: 616 - RNA, 21 nt, Homo sapiens
uagcucaaagagauuuacuuu

SEQ ID NO: 617 - RNA, 21 nt, Homo sapiens
augaauugcuaucaguaaauu

SEQ ID NO: 618 - RNA, 21 nt, Homo sapiens
uuuacugauagcaauucauuu

SEQ ID NO: 619 - RNA, 21 nt, Homo sapiens
agacuuacuccuagauaucuu

SEQ ID NO: 620 - RNA, 21 nt, Homo sapiens
gauaucuaggaguaagucuuu

SEQ ID NO: 621 - RNA, 21 nt, Homo sapiens
ggaguuugcauggaaaucauu

SEQ ID NO: 622 - RNA, 21 nt, Homo sapiens
ugauuuccaugcaaacuccuu

SEQ ID NO: 623 - RNA, 21 nt, Homo sapiens
ugguggguugccgauaaauuu

SEQ ID NO: 624 - RNA, 21 nt, Homo sapiens
auuuaucggcaacccaccauu

SEQ ID NO: 625 - RNA, 21 nt, Homo sapiens
guggguugccgauaaauguuu

SEQ ID NO: 626 - RNA, 21 nt, Homo sapiens
acauuuaucggcaacccacuu

SEQ ID NO: 627 - RNA, 21 nt, Homo sapiens
aaaugucagauguguuaauuu

SEQ ID NO: 628 - RNA, 21 nt, Homo sapiens
auuaacacaucugacauuuuu

SEQ ID NO: 629 - RNA, 21 nt, Homo sapiens
augucauuuaugugaguaauu

SEQ ID NO: 630 - RNA, 21 nt, Homo sapiens
uuacucacauaaaugacauuu

SEQ ID NO: 631 - RNA, 21 nt, Homo sapiens
gagagaaucugucaauuuguu

SEQ ID NO: 632 - RNA, 21 nt, Homo sapiens
caaauugacagauucucucuu

SEQ ID NO: 633 - RNA, 21 nt, Homo sapiens
cuauaucacuaaugaguuauu

SEQ ID NO: 634 - RNA, 21 nt, Homo sapiens
uaacucauuagugauauaguu

SEQ ID NO: 635 - RNA, 21 nt, Homo sapiens
uggacuaagagauguuaauuu

SEQ ID NO: 636 - RNA, 21 nt, Homo sapiens
auuaacaucucuuaguccauu

SEQ ID NO: 637 - DNA, 19 bp, Homo sapiens
atgtgtgaatccaagcaaa

SEQ ID NO: 638 - DNA, 19 bp, Homo sapiens
agccagatgcgatggtata

SEQ ID NO: 639 - DNA, 19 bp, Homo sapiens
tgtgaatccaagcaaacat

SEQ ID NO: 640 - DNA, 19 bp, Homo sapiens
gagtaaagcgtgcgcttta

SEQ ID NO: 641 - DNA, 19 bp, Homo sapiens
tgggagattgcttgagctt

SEQ ID NO: 642 - DNA, 19 bp, Homo sapiens
cgtaggtaatgtgcaaata

SEQ ID NO: 643 - RNA, 19 nt, Homo sapiens
augugugaauccaagcaaa

SEQ ID NO: 644 - RNA, 19 nt, Homo sapiens
uuugcuuggauucacacau

SEQ ID NO: 645 - RNA, 19 nt, Homo sapiens
agccagaugcgaugguaua

SEQ ID NO: 646 - RNA, 19 nt, Homo sapiens
uauaccaucgcaucuggcu

SEQ ID NO: 647 - RNA, 19 nt, Homo sapiens
ugugaauccaagcaaacau

SEQ ID NO: 648 - RNA, 19 nt, Homo sapiens
auguuugcuuggauucaca

SEQ ID NO: 649 - RNA, 19 nt, Homo sapiens
gaguaaagcgugcgcuuua

SEQ ID NO: 650 - RNA, 19 nt, Homo sapiens
uaaagcgcacgcuuuacuc

SEQ ID NO: 651 - RNA, 19 nt, Homo sapiens
ugggagauugcuugagcuu

SEQ ID NO: 652 - RNA, 19 nt, Homo sapiens
aagcucaagcaaucuccca

SEQ ID NO: 653 - RNA, 19 nt, Homo sapiens
cguagguaaugugcaaaua

SEQ ID NO: 654 - RNA, 19 nt, Homo sapiens
uauuugcacauuaccuacg

SEQ ID NO: 655 - RNA, 21 nt, Homo sapiens
augugugaauccaagcaaauu

SEQ ID NO: 656 - RNA, 21 nt, Homo sapiens
uuugcuuggauucacacauuu

SEQ ID NO: 657 - RNA, 21 nt, Homo sapiens
agccagaugcgaugguauauu

SEQ ID NO: 658 - RNA, 21 nt, Homo sapiens
uauaccaucgcaucuggcuuu

SEQ ID NO: 659 - RNA, 21 nt, Homo sapiens
ugugaauccaagcaaacauuu

SEQ ID NO: 660 - RNA, 21 nt, Homo sapiens
auguuugcuuggauucacauu

SEQ ID NO: 661 - RNA, 21 nt, Homo sapiens
gaguaaagcgugcgcuuuauu

SEQ ID NO: 662 - RNA, 21 nt, Homo sapiens
uaaagcgcacgcuuuacucuu

SEQ ID NO: 663 - RNA, 21 nt, Homo sapiens
ugggagauugcuugagcuuuu

SEQ ID NO: 664 - RNA, 21 nt, Homo sapiens
aagcucaagcaaucucccauu

SEQ ID NO: 665 - RNA, 21 nt, Homo sapiens
cguagguaaugugcaaauauu

SEQ ID NO: 666 - RNA, 21 nt, Homo sapiens
uauuugcacauuaccuacguu

SEQ ID NO: 667 - DNA, 19 bp, Homo sapiens
gcaaagttctgccacagaa

SEQ ID NO: 668 - DNA, 19 bp, Homo sapiens
ggagacgtcttgcaaagtt

SEQ ID NO: 669 - DNA, 19 bp, Homo sapiens
tccggagattcgtgagact

SEQ ID NO: 670 - DNA, 19 bp, Homo sapiens
cggagattcgtgagactct

SEQ ID NO: 671 - DNA, 19 bp, Homo sapiens
ggagattcgtgagactcta

SEQ ID NO: 672 - DNA, 19 bp, Homo sapiens
tcgtgagactctagaattg

SEQ ID NO: 673 - DNA, 19 bp, Homo sapiens
cagcaatctctaagagcat

SEQ ID NO: 674 - DNA, 19 bp, Homo sapiens
aggagacgtcttgcaaagt

SEQ ID NO: 675 - DNA, 19 bp, Homo sapiens
gcagcaatctctaagagca

SEQ ID NO: 676 - DNA, 19 bp, Homo sapiens
ggaagtgaggtctaccgat

SEQ ID NO: 677 - DNA, 19 bp, Homo sapiens
tgcattatgtggcttaatt

SEQ ID NO: 678 - DNA, 19 bp, Homo sapiens
cccacgactatccgaaatt

SEQ ID NO: 679 - DNA, 19 bp, Homo sapiens
tccggagattcgtgagact

SEQ ID NO: 680 - DNA, 19 bp, Homo sapiens
cggagattcgtgagactct

SEQ ID NO: 681 - DNA, 19 bp, Homo sapiens
ggagattcgtgagactcta

SEQ ID NO: 682 - DNA, 19 bp, Homo sapiens
tcgtgagactctagaattg

SEQ ID NO: 683 - DNA, 19 bp, Homo sapiens
cagtgtttgggccgagaca

SEQ ID NO: 684 - DNA, 19 bp, Homo sapiens
tgcattatgtggcttaatt

SEQ ID NO: 685 - DNA, 19 bp, Homo sapiens
ggacaagtgccaccgagat

SEQ ID NO: 686 - DNA, 19 bp, Homo sapiens
ctcccaaagctgtgcttaa

SEQ ID NO: 687 - DNA, 19 bp, Homo sapiens
caaagctgtgcttaactga

SEQ ID NO: 688 - DNA, 19 bp, Homo sapiens
gcaaccctgtaaagtcata

SEQ ID NO: 689 - RNA, 19 nt, Homo sapiens
gcaaaguucugccacagaa

SEQ ID NO: 690 - RNA, 19 nt, Homo sapiens
uucuguggcagaacuuugc

SEQ ID NO: 691 - RNA, 19 nt, Homo sapiens
ggagacgucuugcaaaguu

SEQ ID NO: 692 - RNA, 19 nt, Homo sapiens
aacuuugcaagacgucucc

SEQ ID NO: 693 - RNA, 19 nt, Homo sapiens
uccggagauucgugagacu

SEQ ID NO: 694 - RNA, 19 nt, Homo sapiens
agucucacgaaucuccgga

SEQ ID NO: 695 - RNA, 19 nt, Homo sapiens
cggagauucgugagacucu

SEQ ID NO: 696 - RNA, 19 nt, Homo sapiens
agagucucacgaaucuccg

SEQ ID NO: 697 - RNA, 19 nt, Homo sapiens
ggagauucgugagacucua

SEQ ID NO: 698 - RNA, 19 nt, Homo sapiens
uagagucucacgaaucucc

SEQ ID NO: 699 - RNA, 19 nt, Homo sapiens
ucgugagacucuagaauug

SEQ ID NO: 700 - RNA, 19 nt, Homo sapiens
caauucuagagucucacga

SEQ ID NO: 701 - RNA, 19 nt, Homo sapiens
cagcaaucucuaagagcau

SEQ ID NO: 702 - RNA, 19 nt, Homo sapiens
augcucuuagagauugcug

SEQ ID NO: 703 - RNA, 19 nt, Homo sapiens
aggagacgucuugcaaagu

SEQ ID NO: 704 - RNA, 19 nt, Homo sapiens
acuuugcaagacgucuccu

SEQ ID NO: 705 - RNA, 19 nt, Homo sapiens
gcagcaaucucuaagagca

SEQ ID NO: 706 - RNA, 19 nt, Homo sapiens
ugcucuuagagauugcugc

SEQ ID NO: 707 - RNA, 19 nt, Homo sapiens
ggaagugaggucuaccgau

SEQ ID NO: 708 - RNA, 19 nt, Homo sapiens
aucgguagaccucacuucc

SEQ ID NO: 709 - RNA, 19 nt, Homo sapiens
ugcauuauguggcuuaauu

SEQ ID NO: 710 - RNA, 19 nt, Homo sapiens
aauuaagccacauaaugca

SEQ ID NO: 711 - RNA, 19 nt, Homo sapiens
cccacgacuauccgaaauu

SEQ ID NO: 712 - RNA, 19 nt, Homo sapiens
aauuucggauagucguggg

SEQ ID NO: 713 - RNA, 19 nt, Homo sapiens
uccggagauucgugagacu

SEQ ID NO: 714 - RNA, 19 nt, Homo sapiens
agucucacgaaucuccgga

SEQ ID NO: 715 - RNA, 19 nt, Homo sapiens
cggagauucgugagacucu

SEQ ID NO: 716 - RNA, 19 nt, Homo sapiens
agagucucacgaaucuccg

SEQ ID NO: 717 - RNA, 19 nt, Homo sapiens
ggagauucgugagacucua

SEQ ID NO: 718 - RNA, 19 nt, Homo sapiens
uagagucucacgaaucucc

SEQ ID NO: 719 - RNA, 19 nt, Homo sapiens
ucgugagacucuagaauug

SEQ ID NO: 720 - RNA, 19 nt, Homo sapiens
caauucuagagucucacga

SEQ ID NO: 721 - RNA, 19 nt, Homo sapiens
caguguuugggccgagaca

SEQ ID NO: 722 - RNA, 19 nt, Homo sapiens
ugucucggcccaaacacug

SEQ ID NO: 723 - RNA, 19 nt, Homo sapiens
ugcauuauguggcuuaauu

SEQ ID NO: 724 - RNA, 19 nt, Homo sapiens
aauuaagccacauaaugca

SEQ ID NO: 725 - RNA, 19 nt, Homo sapiens
ggacaagugccaccgagau

SEQ ID NO: 726 - RNA, 19 nt, Homo sapiens
aucucgguggcacuugucc

SEQ ID NO: 727 - RNA, 19 nt, Homo sapiens
cucccaaagcugugcuuaa

SEQ ID NO: 728 - RNA, 19 nt, Homo sapiens
uuaagcacagcuuugggag

SEQ ID NO: 729 - RNA, 19 nt, Homo sapiens
caaagcugugcuuaacuga

SEQ ID NO: 730 - RNA, 19 nt, Homo sapiens
ucaguuaagcacagcuuug

SEQ ID NO: 731 - RNA, 19 nt, Homo sapiens
gcaacccuguaaagucaua

SEQ ID NO: 732 - RNA, 19 nt, Homo sapiens
uaugacuuuacaggguugc

SEQ ID NO: 733 - RNA, 21 nt, Homo sapiens
gcaaaguucugccacagaauu

SEQ ID NO: 734 - RNA, 21 nt, Homo sapiens
uucuguggcagaacuuugcuu

SEQ ID NO: 735 - RNA, 21 nt, Homo sapiens
ggagacgucuugcaaaguuuu

SEQ ID NO: 736 - RNA, 21 nt, Homo sapiens
aacuuugcaagacgucuccuu

SEQ ID NO: 737 - RNA, 21 nt, Homo sapiens
uccggagauucgugagacuuu

SEQ ID NO: 738 - RNA, 21 nt, Homo sapiens
agucucacgaaucuccggauu

SEQ ID NO: 739 - RNA, 21 nt, Homo sapiens
cggagauucgugagacucuuu

SEQ ID NO: 740 - RNA, 21 nt, Homo sapiens
agagucucacgaaucuccguu

SEQ ID NO: 741 - RNA, 21 nt, Homo sapiens
ggagauucgugagacucuauu

SEQ ID NO: 742 - RNA, 21 nt, Homo sapiens
uagagucucacgaaucuccuu

SEQ ID NO: 743 - RNA, 21 nt, Homo sapiens
ucgugagacucuagaauuguu

SEQ ID NO: 744 - RNA, 21 nt, Homo sapiens
caauucuagagucucacgauu

SEQ ID NO: 745 - RNA, 21 nt, Homo sapiens
cagcaaucucuaagagcauuu

SEQ ID NO: 746 - RNA, 21 nt, Homo sapiens
augcucuuagagauugcuguu

SEQ ID NO: 747 - RNA, 21 nt, Homo sapiens
aggagacgucuugcaaaguuu

SEQ ID NO: 748 - RNA, 21 nt, Homo sapiens
acuuugcaagacgucuccuuu

SEQ ID NO: 749 - RNA, 21 nt, Homo sapiens
gcagcaaucucuaagagcauu

SEQ ID NO: 750 - RNA, 21 nt, Homo sapiens
ugcucuuagagauugcugcuu

SEQ ID NO: 751 - RNA, 21 nt, Homo sapiens
ggaagugaggucuaccgauuu

SEQ ID NO: 752 - RNA, 21 nt, Homo sapiens
aucgguagaccucacuuccuu

SEQ ID NO: 753 - RNA, 21 nt, Homo sapiens
ugcauuauguggcuuaauuuu

SEQ ID NO: 754 - RNA, 21 nt, Homo sapiens
aauuaagccacauaaugcauu

SEQ ID NO: 755 - RNA, 21 nt, Homo sapiens
cccacgacuauccgaaauuuu

SEQ ID NO: 756 - RNA, 21 nt, Homo sapiens
aauuucggauagucguggguu

SEQ ID NO: 757 - RNA, 21 nt, Homo sapiens
uccggagauucgugagacuuu

SEQ ID NO: 758 - RNA, 21 nt, Homo sapiens
agucucacgaaucuccggauu

SEQ ID NO: 759 - RNA, 21 nt, Homo sapiens
cggagauucgugagacucuuu

SEQ ID NO: 760 - RNA, 21 nt, Homo sapiens
agagucucacgaaucuccguu

SEQ ID NO: 761 - RNA, 21 nt, Homo sapiens
ggagauucgugagacucuauu

SEQ ID NO: 762 - RNA, 21 nt, Homo sapiens
uagagucucacgaaucuccuu

SEQ ID NO: 763 - RNA, 21 nt, Homo sapiens
ucgugagacucuagaauuguu

SEQ ID NO: 764 - RNA, 21 nt, Homo sapiens
caauucuagagucucacgauu

SEQ ID NO: 765 - RNA, 21 nt, Homo sapiens
caguguuugggccgagacauu

SEQ ID NO: 766 - RNA, 21 nt, Homo sapiens
ugucucggcccaaacacuguu

SEQ ID NO: 767 - RNA, 21 nt, Homo sapiens
ugcauuauguggcuuaauuuu

SEQ ID NO: 768 - RNA, 21 nt, Homo sapiens
aauuaagccacauaaugcauu

SEQ ID NO: 769 - RNA, 21 nt, Homo sapiens
ggacaagugccaccgagauuu

SEQ ID NO: 770 - RNA, 21 nt, Homo sapiens
aucucgguggcacuuguccuu

SEQ ID NO: 771 - RNA, 21 nt, Homo sapiens
cucccaaagcugugcuuaauu

SEQ ID NO: 772 - RNA, 21 nt, Homo sapiens
uuaagcacagcuuugggaguu

SEQ ID NO: 773 - RNA, 21 nt, Homo sapiens
caaagcugugcuuaacugauu

SEQ ID NO: 774 - RNA, 21 nt, Homo sapiens
ucaguuaagcacagcuuuguu

SEQ ID NO: 775 - RNA, 21 nt, Homo sapiens
gcaacccuguaaagucauauu

SEQ ID NO: 776 - RNA, 21 nt, Homo sapiens
uaugacuuuacaggguugcuu

SEQ ID NO: 777 - DNA, 19 bp, Homo sapiens
gcgctgtcctatttagaaa

SEQ ID NO: 778 - DNA, 19 bp, Homo sapiens
ccggcagatccctatgaaa

SEQ ID NO: 779 - DNA, 19 bp, Homo sapiens
ctatgaaagccggatttat

SEQ ID NO: 780 - DNA, 19 bp, Homo sapiens
acataactctgttaggata

SEQ ID NO: 781 - DNA, 19 bp, Homo sapiens
agcgctgtcctatttagaa

SEQ ID NO: 782 - DNA, 19 bp, Homo sapiens
aatattatctcaaggctaa

SEQ ID NO: 783 - DNA, 19 bp, Homo sapiens
ctaacagtgtgtcgtataa

SEQ ID NO: 784 - DNA, 19 bp, Homo sapiens
gccgcaagtcaatatttga

SEQ ID NO: 785 - DNA, 19 bp, Homo sapiens
cctatgaaagccggattta

SEQ ID NO: 786 - DNA, 19 bp, Homo sapiens
aagtcaatatttgatcaca

SEQ ID NO: 787 - DNA, 19 bp, Homo sapiens
gctgagctttgcaggcaaa

SEQ ID NO: 788 - DNA, 19 bp, Homo sapiens
ggcagatccctatgaaagc

SEQ ID NO: 789 - DNA, 19 bp, Homo sapiens
gggtttcttcgctctcagt

SEQ ID NO: 790 - DNA, 19 bp, Homo sapiens
tgcaaagcgctgtcctatt

SEQ ID NO: 791 - DNA, 19 bp, Homo sapiens
gaaagccggatttatttat

SEQ ID NO: 792 - DNA, 19 bp, Homo sapiens
tgagatttgtctctgatat

SEQ ID NO: 793 - DNA, 19 bp, Homo sapiens
gcgctgtcctatttagaaa

SEQ ID NO: 794 - DNA, 19 bp, Homo sapiens
ccggcagatccctatgaaa

SEQ ID NO: 795 - DNA, 19 bp, Homo sapiens
ctatgaaagccggatttat

SEQ ID NO: 796 - DNA, 19 bp, Homo sapiens
ggactgcttaatagaaatt

SEQ ID NO: 797 - DNA, 19 bp, Homo sapiens
agcgctgtcctatttagaa

SEQ ID NO: 798 - DNA, 19 bp, Homo sapiens
agaagaatccaggaatcaa

SEQ ID NO: 799 - DNA, 19 bp, Homo sapiens
ggcgggattctcccacaaa

SEQ ID NO: 800 - DNA, 19 bp, Homo sapiens
cacagcatttcgtaactaa

SEQ ID NO: 801 - DNA, 19 bp, Homo sapiens
agagggactgcttaataga

SEQ ID NO: 802 - DNA, 19 bp, Homo sapiens
agatttgtctctgatattc

SEQ ID NO: 803 - RNA, 19 nt, Homo sapiens
gcgcuguccuauuuagaaa

SEQ ID NO: 804 - RNA, 19 nt, Homo sapiens
uuucuaaauaggacagcgc

SEQ ID NO: 805 - RNA, 19 nt, Homo sapiens
ccggcagaucccuaugaaa

SEQ ID NO: 806 - RNA, 19 nt, Homo sapiens
uuucauagggaucugccgg

SEQ ID NO: 807 - RNA, 19 nt, Homo sapiens
cuaugaaagccggauuuau

SEQ ID NO: 808 - RNA, 19 nt, Homo sapiens
auaaauccggcuuucauag

SEQ ID NO: 809 - RNA, 19 nt, Homo sapiens
acauaacucuguuaggaua

SEQ ID NO: 810 - RNA, 19 nt, Homo sapiens
uauccuaacagaguuaugu

SEQ ID NO: 811 - RNA, 19 nt, Homo sapiens
agcgcuguccuauuuagaa

SEQ ID NO: 812 - RNA, 19 nt, Homo sapiens
uucuaaauaggacagcgcu

SEQ ID NO: 813 - RNA, 19 nt, Homo sapiens
aauauuaucucaaggcuaa

SEQ ID NO: 814 - RNA, 19 nt, Homo sapiens
uuagccuugagauaauauu

SEQ ID NO: 815 - RNA, 19 nt, Homo sapiens
cuaacagugugucguauaa

SEQ ID NO: 816 - RNA, 19 nt, Homo sapiens
uuauacgacacacuguuag

SEQ ID NO: 817 - RNA, 19 nt, Homo sapiens
gccgcaagucaauauuuga

SEQ ID NO: 818 - RNA, 19 nt, Homo sapiens
ucaaauauugacuugcggc

SEQ ID NO: 819 - RNA, 19 nt, Homo sapiens
ccuaugaaagccggauuua

SEQ ID NO: 820 - RNA, 19 nt, Homo sapiens
uaaauccggcuuucauagg

SEQ ID NO: 821 - RNA, 19 nt, Homo sapiens
aagucaauauuugaucaca

SEQ ID NO: 822 - RNA, 19 nt, Homo sapiens
ugugaucaaauauugacuu

SEQ ID NO: 823 - RNA, 19 nt, Homo sapiens
gcugagcuuugcaggcaaa

SEQ ID NO: 824 - RNA, 19 nt, Homo sapiens
uuugccugcaaagcucagc

SEQ ID NO: 825 - RNA, 19 nt, Homo sapiens
ggcagaucccuaugaaagc

SEQ ID NO: 826 - RNA, 19 nt, Homo sapiens
gcuuucauagggaucugcc

SEQ ID NO: 827 - RNA, 19 nt, Homo sapiens
ggguuucuucgcucucagu

SEQ ID NO: 828 - RNA, 19 nt, Homo sapiens
acugagagcgaagaaaccc

SEQ ID NO: 829 - RNA, 19 nt, Homo sapiens
ugcaaagcgcuguccuauu

SEQ ID NO: 830 - RNA, 19 nt, Homo sapiens
aauaggacagcgcuuugca

SEQ ID NO: 831 - RNA, 19 nt, Homo sapiens
gaaagccggauuuauuuau

SEQ ID NO: 832 - RNA, 19 nt, Homo sapiens
auaaauaaauccggcuuuc

SEQ ID NO: 833 - RNA, 19 nt, Homo sapiens
ugagauuugucucugauau

SEQ ID NO: 834 - RNA, 19 nt, Homo sapiens
auaucagagacaaaucuca

SEQ ID NO: 835 - RNA, 19 nt, Homo sapiens
gcgcuguccuauuuagaaa

SEQ ID NO: 836 - RNA, 19 nt, Homo sapiens
uuucuaaauaggacagcgc

SEQ ID NO: 837 - RNA, 19 nt, Homo sapiens
ccggcagaucccuaugaaa

SEQ ID NO: 838 - RNA, 19 nt, Homo sapiens
uuucauagggaucugccgg

SEQ ID NO: 839 - RNA, 19 nt, Homo sapiens
cuaugaaagccggauuuau

SEQ ID NO: 840 - RNA, 19 nt, Homo sapiens
auaaauccggcuuucauag

SEQ ID NO: 841 - RNA, 19 nt, Homo sapiens
ggacugcuuaauagaaauu

SEQ ID NO: 842 - RNA, 19 nt, Homo sapiens
aauuucuauuaagcagucc

SEQ ID NO: 843 - RNA, 19 nt, Homo sapiens
agcgcuguccuauuuagaa

SEQ ID NO: 844 - RNA, 19 nt, Homo sapiens
uucuaaauaggacagcgcu

SEQ ID NO: 845 - RNA, 19 nt, Homo sapiens
agaagaauccaggaaucaa

SEQ ID NO: 846 - RNA, 19 nt, Homo sapiens
uugauuccuggauucuucu

SEQ ID NO: 847 - RNA, 19 nt, Homo sapiens
ggcgggauucucccacaaa

SEQ ID NO: 848 - RNA, 19 nt, Homo sapiens
uuugugggagaaucccgcc

SEQ ID NO: 849 - RNA, 19 nt, Homo sapiens
cacagcauuucguaacuaa

SEQ ID NO: 850 - RNA, 19 nt, Homo sapiens
uuaguuacgaaaugcugug

SEQ ID NO: 851 - RNA, 19 nt, Homo sapiens
agagggacugcuuaauaga

SEQ ID NO: 852 - RNA, 19 nt, Homo sapiens
ucuauuaagcagucccucu

SEQ ID NO: 853 - RNA, 19 nt, Homo sapiens
agauuugucucugauauuc

SEQ ID NO: 854 - RNA, 19 nt, Homo sapiens
gaauaucagagacaaaucu

SEQ ID NO: 855 - RNA, 21 nt, Homo sapiens
gcgcuguccuauuuagaaauu

SEQ ID NO: 856 - RNA, 21 nt, Homo sapiens
uuucuaaauaggacagcgcuu

SEQ ID NO: 857 - RNA, 21 nt, Homo sapiens
ccggcagaucccuaugaaauu

SEQ ID NO: 858 - RNA, 21 nt, Homo sapiens
uuucauagggaucugccgguu

SEQ ID NO: 859 - RNA, 21 nt, Homo sapiens
cuaugaaagccggauuuauuu

SEQ ID NO: 860 - RNA, 21 nt, Homo sapiens
auaaauccggcuuucauaguu

SEQ ID NO: 861 - RNA, 21 nt, Homo sapiens
acauaacucuguuaggauauu

SEQ ID NO: 862 - RNA, 21 nt, Homo sapiens
uauccuaacagaguuauguuu

SEQ ID NO: 863 - RNA, 21 nt, Homo sapiens
agcgcuguccuauuuagaauu

SEQ ID NO: 864 - RNA, 21 nt, Homo sapiens
uucuaaauaggacagcgcuuu

SEQ ID NO: 865 - RNA, 21 nt, Homo sapiens
aauauuaucucaaggcuaauu

SEQ ID NO: 866 - RNA, 21 nt, Homo sapiens
uuagccuugagauaauauuuu

SEQ ID NO: 867 - RNA, 21 nt, Homo sapiens
cuaacagugugucguauaauu

SEQ ID NO: 868 - RNA, 21 nt, Homo sapiens
uuauacgacacacuguuaguu

SEQ ID NO: 869 - RNA, 21 nt, Homo sapiens
gccgcaagucaauauuugauu

SEQ ID NO: 870 - RNA, 21 nt, Homo sapiens
ucaaauauugacuugcggcuu

SEQ ID NO: 871 - RNA, 21 nt, Homo sapiens
ccuaugaaagccggauuuauu

SEQ ID NO: 872 - RNA, 21 nt, Homo sapiens
uaaauccggcuuucauagguu

SEQ ID NO: 873 - RNA, 21 nt, Homo sapiens
aagucaauauuugaucacauu

SEQ ID NO: 874 - RNA, 21 nt, Homo sapiens
ugugaucaaauauugacuuuu

SEQ ID NO: 875 - RNA, 21 nt, Homo sapiens
gcugagcuuugcaggcaaauu

SEQ ID NO: 876 - RNA, 21 nt, Homo sapiens
uuugccugcaaagcucagcuu

SEQ ID NO: 877 - RNA, 21 nt, Homo sapiens
ggcagaucccuaugaaagcuu

SEQ ID NO: 878 - RNA, 21 nt, Homo sapiens
gcuuucauagggaucugccuu

SEQ ID NO: 879 - RNA, 21 nt, Homo sapiens
ggguuucuucgcucucaguuu

SEQ ID NO: 880 - RNA, 21 nt, Homo sapiens
acugagagcgaagaaacccuu

SEQ ID NO: 881 - RNA, 21 nt, Homo sapiens
ugcaaagcgcuguccuauuuu

SEQ ID NO: 882 - RNA, 21 nt, Homo sapiens
aauaggacagcgcuuugcauu

SEQ ID NO: 883 - RNA, 21 nt, Homo sapiens
gaaagccggauuuauuuauuu

SEQ ID NO: 884 - RNA, 21 nt, Homo sapiens
auaaauaaauccggcuuucuu

SEQ ID NO: 885 - RNA, 21 nt, Homo sapiens
ugagauuugucucugauauuu

SEQ ID NO: 886 - RNA, 21 nt, Homo sapiens
auaucagagacaaaucucauu

SEQ ID NO: 887 - RNA, 21 nt, Homo sapiens
gcgcuguccuauuuagaaauu

SEQ ID NO: 888 - RNA, 21 nt, Homo sapiens
uuucuaaauaggacagcgcuu

SEQ ID NO: 889 - RNA, 21 nt, Homo sapiens
ccggcagaucccuaugaaauu

SEQ ID NO: 890 - RNA, 21 nt, Homo sapiens
uuucauagggaucugccgguu

SEQ ID NO: 891 - RNA, 21 nt, Homo sapiens
cuaugaaagccggauuuauuu

SEQ ID NO: 892 - RNA, 21 nt, Homo sapiens
auaaauccggcuuucauaguu

SEQ ID NO: 893 - RNA, 21 nt, Homo sapiens
ggacugcuuaauagaaauuuu

SEQ ID NO: 894 - RNA, 21 nt, Homo sapiens
aauuucuauuaagcaguccuu

SEQ ID NO: 895 - RNA, 21 nt, Homo sapiens
agcgcuguccuauuuagaauu

SEQ ID NO: 896 - RNA, 21 nt, Homo sapiens
uucuaaauaggacagcgcuuu

SEQ ID NO: 897 - RNA, 21 nt, Homo sapiens
agaagaauccaggaaucaauu

SEQ ID NO: 898 - RNA, 21 nt, Homo sapiens
uugauuccuggauucuucuuu

SEQ ID NO: 899 - RNA, 21 nt, Homo sapiens
ggcgggauucucccacaaauu

SEQ ID NO: 900 - RNA, 21 nt, Homo sapiens
uuugugggagaaucccgccuu

SEQ ID NO: 901 - RNA, 21 nt, Homo sapiens
cacagcauuucguaacuaauu

SEQ ID NO: 902 - RNA, 21 nt, Homo sapiens
uuaguuacgaaaugcuguguu

SEQ ID NO: 903 - RNA, 21 nt, Homo sapiens
agagggacugcuuaauagauu

SEQ ID NO: 904 - RNA, 21 nt, Homo sapiens
ucuauuaagcagucccucuuu

SEQ ID NO: 905 - RNA, 21 nt, Homo sapiens
agauuugucucugauauucuu

SEQ ID NO: 906 - RNA, 21 nt, Homo sapiens
gaauaucagagacaaaucuuu

SEQ ID NO: 907 - DNA, 19 bp, Homo sapiens
taatagggctcatgagaaa

SEQ ID NO: 908 - DNA, 19 bp, Homo sapiens
ctacgtatcaattgatgaa

SEQ ID NO: 909 - DNA, 19 bp, Homo sapiens
tcttgattatgagacttaa

SEQ ID NO: 910 - DNA, 19 bp, Homo sapiens
agaggtgagaggtatcaat

SEQ ID NO: 911 - DNA, 19 bp, Homo sapiens
acttgaagagtcggagaat

SEQ ID NO: 912 - DNA, 19 bp, Homo sapiens
gaacatgtctcacaagtga

SEQ ID NO: 913 - DNA, 19 bp, Homo sapiens
ggtctcctctaaagcgata

SEQ ID NO: 914 - RNA, 19 nt, Homo sapiens
uaauagggcucaugagaaa

SEQ ID NO: 915 - RNA, 19 nt, Homo sapiens
uuucucaugagcccuauua

SEQ ID NO: 916 - RNA, 19 nt, Homo sapiens
cuacguaucaauugaugaa

SEQ ID NO: 917 - RNA, 19 nt, Homo sapiens
uucaucaauugauacguag

SEQ ID NO: 918 - RNA, 19 nt, Homo sapiens
ucuugauuaugagacuuaa

SEQ ID NO: 919 - RNA, 19 nt, Homo sapiens
uuaagucucauaaucaaga

SEQ ID NO: 920 - RNA, 19 nt, Homo sapiens
agaggugagagguaucaau

SEQ ID NO: 921 - RNA, 19 nt, Homo sapiens
auugauaccucucaccucu

SEQ ID NO: 922 - RNA, 19 nt, Homo sapiens
acuugaagagucggagaau

SEQ ID NO: 923 - RNA, 19 nt, Homo sapiens
auucuccgacucuucaagu

SEQ ID NO: 924 - RNA, 19 nt, Homo sapiens
gaacaugucucacaaguga

SEQ ID NO: 925 - RNA, 19 nt, Homo sapiens
ucacuugugagacauguuc

SEQ ID NO: 926 - RNA, 19 nt, Homo sapiens
ggucuccucuaaagcgaua

SEQ ID NO: 927 - RNA, 19 nt, Homo sapiens
uaucgcuuuagaggagacc

SEQ ID NO: 928 - RNA, 21 nt, Homo sapiens
uaauagggcucaugagaaauu

SEQ ID NO: 929 - RNA, 21 nt, Homo sapiens
uuucucaugagcccuauuauu

SEQ ID NO: 930 - RNA, 21 nt, Homo sapiens
cuacguaucaauugaugaauu

SEQ ID NO: 931 - RNA, 21 nt, Homo sapiens
uucaucaauugauacguaguu

SEQ ID NO: 932 - RNA, 21 nt, Homo sapiens
ucuugauuaugagacuuaauu

SEQ ID NO: 933 - RNA, 21 nt, Homo sapiens
uuaagucucauaaucaagauu

SEQ ID NO: 934 - RNA, 21 nt, Homo sapiens
agaggugagagguaucaauuu

SEQ ID NO: 935 - RNA, 21 nt, Homo sapiens
auugauaccucucaccucuuu

SEQ ID NO: 936 - RNA, 21 nt, Homo sapiens
acuugaagagucggagaauuu

SEQ ID NO: 937 - RNA, 21 nt, Homo sapiens
auucuccgacucuucaaguuu

SEQ ID NO: 938 - RNA, 21 nt, Homo sapiens
gaacaugucucacaagugauu

SEQ ID NO: 939 - RNA, 21 nt, Homo sapiens
ucacuugugagacauguucuu

SEQ ID NO: 940 - RNA, 21 nt, Homo sapiens
ggucuccucuaaagcgauauu

SEQ ID NO: 941 - RNA, 21 nt, Homo sapiens
uaucgcuuuagaggagaccuu

SEQ ID NO: 942 - DNA, 19 bp, Homo sapiens
tcagttatcaattgtacaa

SEQ ID NO: 943 - DNA, 19 bp, Homo sapiens
ggcattctaactgatacta

SEQ ID NO: 944 - DNA, 19 bp, Homo sapiens
gcggttatgtctccaacca

SEQ ID NO: 945 - DNA, 19 bp, Homo sapiens
tgagttggcttcgtagtta

SEQ ID NO: 946 - DNA, 19 bp, Homo sapiens
gagaaatgcggttatgtct

SEQ ID NO: 947 - DNA, 19 bp, Homo sapiens
cgagaaatgcggttatgtc

SEQ ID NO: 948 - DNA, 19 bp, Homo sapiens
aggcattctaactgatact

SEQ ID NO: 949 - DNA, 19 bp, Homo sapiens
agatcgtcattcaaagata

SEQ ID NO: 950 - DNA, 19 bp, Homo sapiens
gcgttgtttccttgaacaa

SEQ ID NO: 951 - DNA, 19 bp, Homo sapiens
cgttgtttccttgaacaat

SEQ ID NO: 952 - DNA, 19 bp, Homo sapiens
tgtgtcattccacgaattt

SEQ ID NO: 953 - DNA, 19 bp, Homo sapiens
ggcgttaccatatttaaat

SEQ ID NO: 954 - DNA, 19 bp, Homo sapiens
aattaaaccttgagatgaa

SEQ ID NO: 955 - DNA, 19 bp, Homo sapiens
gagctttgggcccgtaaga

SEQ ID NO: 956 - DNA, 19 bp, Homo sapiens
ggtggatacgttaaagagt

SEQ ID NO: 957 - DNA, 19 bp, Homo sapiens
gcgttaccatatttaaatt

SEQ ID NO: 958 - DNA, 19 bp, Homo sapiens
ggagaactgtgtttagtga

SEQ ID NO: 959 - DNA, 19 bp, Homo sapiens
caggcgttaccatatttaa

SEQ ID NO: 960 - DNA, 19 bp, Homo sapiens
ccttaatcagatcgtcatt

SEQ ID NO: 961 - DNA, 19 bp, Homo sapiens
gctttgggcccgtaagaaa

SEQ ID NO: 962 - DNA, 19 bp, Homo sapiens
gcccggttatcttattgat

SEQ ID NO: 963 - DNA, 19 bp, Homo sapiens
ggatagcattccactgtaa

SEQ ID NO: 964 - DNA, 19 bp, Homo sapiens
gtggatacgttaaagagta

SEQ ID NO: 965 - RNA, 19 nt, Homo sapiens
ucaguuaucaauuguacaa

SEQ ID NO: 966 - RNA, 19 nt, Homo sapiens
uuguacaauugauaacuga

SEQ ID NO: 967 - RNA, 19 nt, Homo sapiens
ggcauucuaacugauacua

SEQ ID NO: 968 - RNA, 19 nt, Homo sapiens
uaguaucaguuagaaugcc

SEQ ID NO: 969 - RNA, 19 nt, Homo sapiens
gcgguuaugucuccaacca

SEQ ID NO: 970 - RNA, 19 nt, Homo sapiens
ugguuggagacauaaccgc

SEQ ID NO: 971 - RNA, 19 nt, Homo sapiens
ugaguuggcuucguaguua

SEQ ID NO: 972 - RNA, 19 nt, Homo sapiens
uaacuacgaagccaacuca

SEQ ID NO: 973 - RNA, 19 nt, Homo sapiens
gagaaaugcgguuaugucu

SEQ ID NO: 974 - RNA, 19 nt, Homo sapiens
agacauaaccgcauuucuc

SEQ ID NO: 975 - RNA, 19 nt, Homo sapiens
cgagaaaugcgguuauguc

SEQ ID NO: 976 - RNA, 19 nt, Homo sapiens
gacauaaccgcauuucucg

SEQ ID NO: 977 - RNA, 19 nt, Homo sapiens
aggcauucuaacugauacu

SEQ ID NO: 978 - RNA, 19 nt, Homo sapiens
aguaucaguuagaaugccu

SEQ ID NO: 979 - RNA, 19 nt, Homo sapiens
agaucgucauucaaagaua

SEQ ID NO: 980 - RNA, 19 nt, Homo sapiens
uaucuuugaaugacgaucu

SEQ ID NO: 981 - RNA, 19 nt, Homo sapiens
gcguuguuuccuugaacaa

SEQ ID NO: 982 - RNA, 19 nt, Homo sapiens
uuguucaaggaaacaacgc

SEQ ID NO: 983 - RNA, 19 nt, Homo sapiens
cguuguuuccuugaacaau

SEQ ID NO: 984 - RNA, 19 nt, Homo sapiens
auuguucaaggaaacaacg

SEQ ID NO: 985 - RNA, 19 nt, Homo sapiens
ugugucauuccacgaauuu

SEQ ID NO: 986 - RNA, 19 nt, Homo sapiens
aaauucguggaaugacaca

SEQ ID NO: 987 - RNA, 19 nt, Homo sapiens
ggcguuaccauauuuaaau

SEQ ID NO: 988 - RNA, 19 nt, Homo sapiens
auuuaaauaugguaacgcc

SEQ ID NO: 989 - RNA, 19 nt, Homo sapiens
aauuaaaccuugagaugaa

SEQ ID NO: 990 - RNA, 19 nt, Homo sapiens
uucaucucaagguuuaauu

SEQ ID NO: 991 - RNA, 19 nt, Homo sapiens
gagcuuugggcccguaaga

SEQ ID NO: 992 - RNA, 19 nt, Homo sapiens
ucuuacgggcccaaagcuc

SEQ ID NO: 993 - RNA, 19 nt, Homo sapiens
gguggauacguuaaagagu

SEQ ID NO: 994 - RNA, 19 nt, Homo sapiens
acucuuuaacguauccacc

SEQ ID NO: 995 - RNA, 19 nt, Homo sapiens
gcguuaccauauuuaaauu

SEQ ID NO: 996 - RNA, 19 nt, Homo sapiens
aauuuaaauaugguaacgc

SEQ ID NO: 997 - RNA, 19 nt, Homo sapiens
ggagaacuguguuuaguga

SEQ ID NO: 998 - RNA, 19 nt, Homo sapiens
ucacuaaacacaguucucc

SEQ ID NO: 999 - RNA, 19 nt, Homo sapiens
caggcguuaccauauuuaa

SEQ ID NO: 1000 - RNA, 19 nt, Homo sapiens
uuaaauaugguaacgccug

SEQ ID NO: 1001 - RNA, 19 nt, Homo sapiens
ccuuaaucagaucgucauu

SEQ ID NO: 1002 - RNA, 19 nt, Homo sapiens
aaugacgaucugauuaagg

SEQ ID NO: 1003 - RNA, 19 nt, Homo sapiens
gcuuugggcccguaagaaa

SEQ ID NO: 1004 - RNA, 19 nt, Homo sapiens
uuucuuacgggcccaaagc

SEQ ID NO: 1005 - RNA, 19 nt, Homo sapiens
gcccgguuaucuuauugau

SEQ ID NO: 1006 - RNA, 19 nt, Homo sapiens
aucaauaagauaaccgggc

SEQ ID NO: 1007 - RNA, 19 nt, Homo sapiens
ggauagcauuccacuguaa

SEQ ID NO: 1008 - RNA, 19 nt, Homo sapiens
uuacaguggaaugcuaucc

SEQ ID NO: 1009 - RNA, 19 nt, Homo sapiens
guggauacguuaaagagua

SEQ ID NO: 1010 - RNA, 19 nt, Homo sapiens
uacucuuuaacguauccac

SEQ ID NO: 1011 - RNA, 21 nt, Homo sapiens
ucaguuaucaauuguacaauu

SEQ ID NO: 1012 - RNA, 21 nt, Homo sapiens
uuguacaauugauaacugauu

SEQ ID NO: 1013 - RNA, 21 nt, Homo sapiens
ggcauucuaacugauacuauu

SEQ ID NO: 1014 - RNA, 21 nt, Homo sapiens
uaguaucaguuagaaugccuu

SEQ ID NO: 1015 - RNA, 21 nt, Homo sapiens
gcgguuaugucuccaaccauu

SEQ ID NO: 1016 - RNA, 21 nt, Homo sapiens
ugguuggagacauaaccgcuu

SEQ ID NO: 1017 - RNA, 21 nt, Homo sapiens
ugaguuggcuucguaguuauu

SEQ ID NO: 1018 - RNA, 21 nt, Homo sapiens
uaacuacgaagccaacucauu

SEQ ID NO: 1019 - RNA, 21 nt, Homo sapiens
gagaaaugcgguuaugucuuu

SEQ ID NO: 1020 - RNA, 21 nt, Homo sapiens
agacauaaccgcauuucucuu

SEQ ID NO: 1021 - RNA, 21 nt, Homo sapiens
cgagaaaugcgguuaugucuu

SEQ ID NO: 1022 - RNA, 21 nt, Homo sapiens
gacauaaccgcauuucucguu

SEQ ID NO: 1023 - RNA, 21 nt, Homo sapiens
aggcauucuaacugauacuuu

SEQ ID NO: 1024 - RNA, 21 nt, Homo sapiens
aguaucaguuagaaugccuuu

SEQ ID NO: 1025 - RNA, 21 nt, Homo sapiens
agaucgucauucaaagauauu

SEQ ID NO: 1026 - RNA, 21 nt, Homo sapiens
uaucuuugaaugacgaucuuu

SEQ ID NO: 1027 - RNA, 21 nt, Homo sapiens
gcguuguuuccuugaacaauu

SEQ ID NO: 1028 - RNA, 21 nt, Homo sapiens
uuguucaaggaaacaacgcuu

SEQ ID NO: 1029 - RNA, 21 nt, Homo sapiens
cguuguuuccuugaacaauuu

SEQ ID NO: 1030 - RNA, 21 nt, Homo sapiens
auuguucaaggaaacaacguu

SEQ ID NO: 1031 - RNA, 21 nt, Homo sapiens
ugugucauuccacgaauuuuu

SEQ ID NO: 1032 - RNA, 21 nt, Homo sapiens
aaauucguggaaugacacauu

SEQ ID NO: 1033 - RNA, 21 nt, Homo sapiens
ggcguuaccauauuuaaauuu

SEQ ID NO: 1034 - RNA, 21 nt, Homo sapiens
auuuaaauaugguaacgccuu

SEQ ID NO: 1035 - RNA, 21 nt, Homo sapiens
aauuaaaccuugagaugaauu

SEQ ID NO: 1036 - RNA, 21 nt, Homo sapiens
uucaucucaagguuuaauuuu

SEQ ID NO: 1037 - RNA, 21 nt, Homo sapiens
gagcuuugggcccguaagauu

SEQ ID NO: 1038 - RNA, 21 nt, Homo sapiens
ucuuacgggcccaaagcucuu

SEQ ID NO: 1039 - RNA, 21 nt, Homo sapiens
gguggauacguuaaagaguuu

SEQ ID NO: 1040 - RNA, 21 nt, Homo sapiens
acucuuuaacguauccaccuu

SEQ ID NO: 1041 - RNA, 21 nt, Homo sapiens
gcguuaccauauuuaaauuuu

SEQ ID NO: 1042 - RNA, 21 nt, Homo sapiens
aauuuaaauaugguaacgcuu

SEQ ID NO: 1043 - RNA, 21 nt, Homo sapiens
ggagaacuguguuuagugauu

SEQ ID NO: 1044 - RNA, 21 nt, Homo sapiens
ucacuaaacacaguucuccuu

SEQ ID NO: 1045 - RNA, 21 nt, Homo sapiens
caggcguuaccauauuuaauu

SEQ ID NO: 1046 - RNA, 21 nt, Homo sapiens
uuaaauaugguaacgccuguu

SEQ ID NO: 1047 - RNA, 21 nt, Homo sapiens
ccuuaaucagaucgucauuuu

SEQ ID NO: 1048 - RNA, 21 nt, Homo sapiens
aaugacgaucugauuaagguu

SEQ ID NO: 1049 - RNA, 21 nt, Homo sapiens
gcuuugggcccguaagaaauu

SEQ ID NO: 1050 - RNA, 21 nt, Homo sapiens
uuucuuacgggcccaaagcuu

SEQ ID NO: 1051 - RNA, 21 nt, Homo sapiens
gcccgguuaucuuauugauuu

SEQ ID NO: 1052 - RNA, 21 nt, Homo sapiens
aucaauaagauaaccgggcuu

SEQ ID NO: 1053 - RNA, 21 nt, Homo sapiens
ggauagcauuccacuguaauu

SEQ ID NO: 1054 - RNA, 21 nt, Homo sapiens
uuacaguggaaugcuauccuu

SEQ ID NO: 1055 - RNA, 21 nt, Homo sapiens
guggauacguuaaagaguauu

SEQ ID NO: 1056 - RNA, 21 nt, Homo sapiens
uacucuuuaacguauccacuu

SEQ ID NO: 1057 - DNA, 19 bp, Homo sapiens
catcgtttccgagagaatt

SEQ ID NO: 1058 - DNA, 19 bp, Homo sapiens
atcgtttccgagagaatta

SEQ ID NO: 1059 - DNA, 19 bp, Homo sapiens
attgaagtctcctgaggat

SEQ ID NO: 1060 - DNA, 19 bp, Homo sapiens
tcgtttccgagagaattaa

SEQ ID NO: 1061 - DNA, 19 bp, Homo sapiens
ttcatcgtttccgagagaa

SEQ ID NO: 1062 - RNA, 19 nt, Homo sapiens
caucguuuccgagagaauu

SEQ ID NO: 1063 - skipped

SEQ ID NO: 1064 - RNA, 19 nt, Homo sapiens
aucguuuccgagagaauua

SEQ ID NO: 1065 - skipped

SEQ ID NO: 1066 - RNA, 19 nt, Homo sapiens
auugaagucuccugaggau

SEQ ID NO: 1067 - skipped

SEQ ID NO: 1068 - RNA, 19 nt, Homo sapiens
ucguuuccgagagaauuaa

SEQ ID NO: 1069 - skipped

SEQ ID NO: 1070 - RNA, 19 nt, Homo sapiens
uucaucguuuccgagagaa

SEQ ID NO: 1071 - RNA, 19 nt, Homo sapiens
aauucucucggaaacgaug

SEQ ID NO: 1072 - skipped

SEQ ID NO: 1073 - RNA, 19 nt, Homo sapiens
uaauucucucggaaacgau

SEQ ID NO: 1074 - skipped

SEQ ID NO: 1075 - RNA, 19 nt, Homo sapiens
auccucaggagacuucaau

SEQ ID NO: 1076 - skipped

SEQ ID NO: 1077 - RNA, 19 nt, Homo sapiens
uuaauucucucggaaacga

SEQ ID NO: 1078 - skipped

SEQ ID NO: 1079 - RNA, 19 nt, Homo sapiens
uucucucggaaacgaugaa

SEQ ID NO: 1080 - RNA, 21 nt, Homo sapiens
caucguuuccgagagaauuuu

SEQ ID NO: 1081 - RNA, 21 nt, Homo sapiens
aauucucucggaaacgauguu

SEQ ID NO: 1082 - RNA, 21 nt, Homo sapiens
aucguuuccgagagaauuauu

SEQ ID NO: 1083 - RNA, 21 nt, Homo sapiens
uaauucucucggaaacgauuu

SEQ ID NO: 1084 - RNA, 21 nt, Homo sapiens
auugaagucuccugaggauuu

SEQ ID NO: 1085 - RNA, 21 nt, Homo sapiens
auccucaggagacuucaauuu

SEQ ID NO: 1086 - RNA, 21 nt, Homo sapiens
ucguuuccgagagaauuaauu

SEQ ID NO: 1087 - RNA, 21 nt, Homo sapiens
uuaauucucucggaaacgauu

SEQ ID NO: 1088 - RNA, 21 nt, Homo sapiens
uucaucguuuccgagagaauu

SEQ ID NO: 1089 - RNA, 21 nt, Homo sapiens
uucucucggaaacgaugaauu

SEQ ID NO: 1090 - DNA, 19 bp, Homo sapiens
ggaaagatcccagggatta

SEQ ID NO: 1091 - DNA, 19 bp, Homo sapiens
agaatgaaaccttggatta

SEQ ID NO: 1092 - DNA, 19 bp, Homo sapiens
ggctacctctcttagaata

SEQ ID NO: 1093 - DNA, 19 bp, Homo sapiens
cggagatctcgaagcatgt

SEQ ID NO: 1094 - DNA, 19 bp, Homo sapiens
tcctcagagtcaagttatt

SEQ ID NO: 1095 - DNA, 19 bp, Homo sapiens
ggaggagggttcttatagt

SEQ ID NO: 1096 - DNA, 19 bp, Homo sapiens
gaatcatactcacaaagaa

SEQ ID NO: 1097 - DNA, 19 bp, Homo sapiens
cagtttagcttggaaagat

SEQ ID NO: 1098 - DNA, 19 bp, Homo sapiens
acaatgggattgagaaata

SEQ ID NO: 1099 - DNA, 19 bp, Homo sapiens
gctggagtctaaagtttaa

SEQ ID NO: 1100 - DNA, 19 bp, Homo sapiens
agaggattcaacagtgatg

SEQ ID NO: 1101 - RNA, 19 nt, Homo sapiens
ggaaagaucccagggauua

SEQ ID NO: 1102 - RNA, 19 nt, Homo sapiens
uaaucccugggaucuuucc

SEQ ID NO: 1103 - RNA, 19 nt, Homo sapiens
agaaugaaaccuuggauua

SEQ ID NO: 1104 - RNA, 19 nt, Homo sapiens
uaauccaagguuucauucu

SEQ ID NO: 1105 - RNA, 19 nt, Homo sapiens
ggcuaccucucuuagaaua

SEQ ID NO: 1106 - RNA, 19 nt, Homo sapiens
uauucuaagagagguagcc

SEQ ID NO: 1107 - RNA, 19 nt, Homo sapiens
cggagaucucgaagcaugu

SEQ ID NO: 1108 - RNA, 19 nt, Homo sapiens
acaugcuucgagaucuccg

SEQ ID NO: 1109 - RNA, 19 nt, Homo sapiens
uccucagagucaaguuauu

SEQ ID NO: 1110 - RNA, 19 nt, Homo sapiens
aauaacuugacucugagga

SEQ ID NO: 1111 - RNA, 19 nt, Homo sapiens
ggaggaggguucuuauagu

SEQ ID NO: 1112 - RNA, 19 nt, Homo sapiens
acuauaagaacccuccucc

SEQ ID NO: 1113 - RNA, 19 nt, Homo sapiens
gaaucauacucacaaagaa

SEQ ID NO: 1114 - RNA, 19 nt, Homo sapiens
uucuuugugaguaugauuc

SEQ ID NO: 1115 - RNA, 19 nt, Homo sapiens
caguuuagcuuggaaagau

SEQ ID NO: 1116 - RNA, 19 nt, Homo sapiens
aucuuuccaagcuaaacug

SEQ ID NO: 1117 - RNA, 19 nt, Homo sapiens
acaaugggauugagaaaua

SEQ ID NO: 1118 - RNA, 19 nt, Homo sapiens
uauuucucaaucccauugu

SEQ ID NO: 1119 - RNA, 19 nt, Homo sapiens
gcuggagucuaaaguuuaa

SEQ ID NO: 1120 - RNA, 19 nt, Homo sapiens
uuaaacuuuagacuccagc

SEQ ID NO: 1121 - RNA, 19 nt, Homo sapiens
agaggauucaacagugaug

SEQ ID NO: 1122 - RNA, 19 nt, Homo sapiens
caucacuguugaauccucu

SEQ ID NO: 1123 - RNA, 21 nt, Homo sapiens
ggaaagaucccagggauuauu

SEQ ID NO: 1124 - RNA, 21 nt, Homo sapiens
uaaucccugggaucuuuccuu

SEQ ID NO: 1125 - RNA, 21 nt, Homo sapiens
agaaugaaaccuuggauuauu

SEQ ID NO: 1126 - RNA, 21 nt, Homo sapiens
uaauccaagguuucauucuuu

SEQ ID NO: 1127 - RNA, 21 nt, Homo sapiens
ggcuaccucucuuagaauauu

SEQ ID NO: 1128 - RNA, 21 nt, Homo sapiens
uauucuaagagagguagccuu

SEQ ID NO: 1129 - RNA, 21 nt, Homo sapiens
cggagaucucgaagcauguuu

SEQ ID NO: 1130 - RNA, 21 nt, Homo sapiens
acaugcuucgagaucuccguu

SEQ ID NO: 1131 - RNA, 21 nt, Homo sapiens
uccucagagucaaguuauuuu

SEQ ID NO: 1132 - RNA, 21 nt, Homo sapiens
aauaacuugacucugaggauu

SEQ ID NO: 1133 - RNA, 21 nt, Homo sapiens
ggaggaggguucuuauaguuu

SEQ ID NO: 1134 - RNA, 21 nt, Homo sapiens
acuauaagaacccuccuccuu

SEQ ID NO: 1135 - RNA, 21 nt, Homo sapiens
gaaucauacucacaaagaauu

SEQ ID NO: 1136 - RNA, 21 nt, Homo sapiens
uucuuugugaguaugauucuu

SEQ ID NO: 1137 - RNA, 21 nt, Homo sapiens
caguuuagcuuggaaagauuu

SEQ ID NO: 1138 - RNA, 21 nt, Homo sapiens
aucuuuccaagcuaaacuguu

SEQ ID NO: 1139 - RNA, 21 nt, Homo sapiens
acaaugggauugagaaauauu

SEQ ID NO: 1140 - RNA, 21 nt, Homo sapiens
uauuucucaaucccauuguuu

SEQ ID NO: 1141 - RNA, 21 nt, Homo sapiens
gcuggagucuaaaguuuaauu

SEQ ID NO: 1142 - RNA, 21 nt, Homo sapiens
uuaaacuuuagacuccagcuu

SEQ ID NO: 1143 - RNA, 21 nt, Homo sapiens
agaggauucaacagugauguu

SEQ ID NO: 1144 - RNA, 21 nt, Homo sapiens
caucacuguugaauccucuuu

SEQ ID NO: 1145 - DNA, 19 bp, Homo sapiens
gaattgtcttatcgataaa

SEQ ID NO: 1146 - DNA, 19 bp, Homo sapiens
aggtgatagctctaattca

SEQ ID NO: 1147 - DNA, 19 bp, Homo sapiens
ggtgatagctctaattcat

SEQ ID NO: 1148 - DNA, 19 bp, Homo sapiens
gaaatgatctccagctaga

SEQ ID NO: 1149 - DNA, 19 bp, Homo sapiens
ttagaattgtcttatcgat

SEQ ID NO: 1150 - RNA, 19 nt, Homo sapiens
gaauugucuuaucgauaaa

SEQ ID NO: 1151 - RNA, 19 nt, Homo sapiens
uuuaucgauaagacaauuc

SEQ ID NO: 1152 - RNA, 19 nt, Homo sapiens
aggugauagcucuaauuca

SEQ ID NO: 1153 - RNA, 19 nt, Homo sapiens
ugaauuagagcuaucaccu

SEQ ID NO: 1154 - RNA, 19 nt, Homo sapiens
ggugauagcucuaauucau

SEQ ID NO: 1155 - RNA, 19 nt, Homo sapiens
augaauuagagcuaucacc

SEQ ID NO: 1156 - RNA, 19 nt, Homo sapiens
gaaaugaucuccagcuaga

SEQ ID NO: 1157 - RNA, 19 nt, Homo sapiens
ucuagcuggagaucauuuc

SEQ ID NO: 1158 - RNA, 19 nt, Homo sapiens
uuagaauugucuuaucgau

SEQ ID NO: 1159 - RNA, 19 nt, Homo sapiens
aucgauaagacaauucuaa

SEQ ID NO: 1160 - RNA, 21 nt, Homo sapiens
gaauugucuuaucgauaaauu

SEQ ID NO: 1161 - RNA, 21 nt, Homo sapiens
uuuaucgauaagacaauucuu

SEQ ID NO: 1162 - RNA, 21 nt, Homo sapiens
aggugauagcucuaauucauu

SEQ ID NO: 1163 - RNA, 21 nt, Homo sapiens
ugaauuagagcuaucaccuuu

SEQ ID NO: 1164 - RNA, 21 nt, Homo sapiens
ggugauagcucuaauucauuu

SEQ ID NO: 1165 - RNA, 21 nt, Homo sapiens
augaauuagagcuaucaccuu

SEQ ID NO: 1166 - RNA, 21 nt, Homo sapiens
gaaaugaucuccagcuagauu

SEQ ID NO: 1167 - RNA, 21 nt, Homo sapiens
ucuagcuggagaucauuucuu

SEQ ID NO: 1168 - RNA, 21 nt, Homo sapiens
uuagaauugucuuaucgauuu

SEQ ID NO: 1169 - RNA, 21 nt, Homo sapiens
aucgauaagacaauucuaauu

SEQ ID NO: 1170 - DNA, 19 bp, Homo sapiens
tgacgttatctctgagtaa

SEQ ID NO: 1171 - DNA, 19 bp, Homo sapiens
tgtttatctacctgaaatt

SEQ ID NO: 1172 - DNA, 19 bp, Homo sapiens
cgttatctctgagtaaagt

SEQ ID NO: 1173 - DNA, 19 bp, Homo sapiens
tggtggtgagcttagaaat

SEQ ID NO: 1174 - DNA, 19 bp, Homo sapiens
agagtagactcacactaat

SEQ ID NO: 1175 - DNA, 19 bp, Homo sapiens
tggtcaaagtctgttcaaa

SEQ ID NO: 1176 - DNA, 19 bp, Homo sapiens
gtcacatactcaagatgtt

SEQ ID NO: 1177 - DNA, 19 bp, Homo sapiens
agagagtcatcattacaaa

SEQ ID NO: 1178 - DNA, 19 bp, Homo sapiens
gctggtcccttgaattaaa

SEQ ID NO: 1179 - DNA, 19 bp, Homo sapiens
tggctggtcccttgaatta

SEQ ID NO: 1180 - DNA, 19 bp, Homo sapiens
ggctggtcccttgaattaa

SEQ ID NO: 1181 - DNA, 19 bp, Homo sapiens
ggctatagctgattggaaa

SEQ ID NO: 1182 - DNA, 19 bp, Homo sapiens
ggaactttatgacagacaa

SEQ ID NO: 1183 - DNA, 19 bp, Homo sapiens
ggtccctatagcagaaatt

SEQ ID NO: 1184 - DNA, 19 bp, Homo sapiens
gcagtcctgtcagttcata

SEQ ID NO: 1185 - DNA, 19 bp, Homo sapiens
tatgatcgcacctatgaat

SEQ ID NO: 1186 - RNA, 19 nt, Homo sapiens
ugacguuaucucugaguaa

SEQ ID NO: 1187 - RNA, 19 nt, Homo sapiens
uuacucagagauaacguca

SEQ ID NO: 1188 - RNA, 19 nt, Homo sapiens
uguuuaucuaccugaaauu

SEQ ID NO: 1189 - RNA, 19 nt, Homo sapiens
aauuucagguagauaaaca

SEQ ID NO: 1190 - RNA, 19 nt, Homo sapiens
cguuaucucugaguaaagu

SEQ ID NO: 1191 - RNA, 19 nt, Homo sapiens
acuuuacucagagauaacg

SEQ ID NO: 1192 - RNA, 19 nt, Homo sapiens
ugguggugagcuuagaaau

SEQ ID NO: 1193 - RNA, 19 nt, Homo sapiens
auuucuaagcucaccacca

SEQ ID NO: 1194 - RNA, 19 nt, Homo sapiens
agaguagacucacacuaau

SEQ ID NO: 1195 - RNA, 19 nt, Homo sapiens
auuagugugagucuacucu

SEQ ID NO: 1196 - RNA, 19 nt, Homo sapiens
uggucaaagucuguucaaa

SEQ ID NO: 1197 - RNA, 19 nt, Homo sapiens
uuugaacagacuuugacca

SEQ ID NO: 1198 - RNA, 19 nt, Homo sapiens
gucacauacucaagauguu

SEQ ID NO: 1199 - RNA, 19 nt, Homo sapiens
aacaucuugaguaugugac

SEQ ID NO: 1200 - RNA, 19 nt, Homo sapiens
agagagucaucauuacaaa

SEQ ID NO: 1201 - RNA, 19 nt, Homo sapiens
uuuguaaugaugacucucu

SEQ ID NO: 1202 - RNA, 19 nt, Homo sapiens
gcuggucccuugaauuaaa

SEQ ID NO: 1203 - RNA, 19 nt, Homo sapiens
uuuaauucaagggaccagc

SEQ ID NO: 1204 - RNA, 19 nt, Homo sapiens
uggcuggucccuugaauua

SEQ ID NO: 1205 - RNA, 19 nt, Homo sapiens
uaauucaagggaccagcca

SEQ ID NO: 1206 - RNA, 19 nt, Homo sapiens
ggcuggucccuugaauuaa

SEQ ID NO: 1207 - RNA, 19 nt, Homo sapiens
uuaauucaagggaccagcc

SEQ ID NO: 1208 - RNA, 19 nt, Homo sapiens
ggcuauagcugauuggaaa

SEQ ID NO: 1209 - RNA, 19 nt, Homo sapiens
uuuccaaucagcuauagcc

SEQ ID NO: 1210 - RNA, 19 nt, Homo sapiens
ggaacuuuaugacagacaa

SEQ ID NO: 1211 - RNA, 19 nt, Homo sapiens
uugucugucauaaaguucc

SEQ ID NO: 1212 - RNA, 19 nt, Homo sapiens
ggucccuauagcagaaauu

SEQ ID NO: 1213 - RNA, 19 nt, Homo sapiens
aauuucugcuauagggacc

SEQ ID NO: 1214 - RNA, 19 nt, Homo sapiens
gcaguccugucaguucaua

SEQ ID NO: 1215 - RNA, 19 nt, Homo sapiens
uaugaacugacaggacugc

SEQ ID NO: 1216 - RNA, 19 nt, Homo sapiens
uaugaucgcaccuaugaau

SEQ ID NO: 1217 - RNA, 19 nt, Homo sapiens
auucauaggugcgaucaua

SEQ ID NO: 1218 - RNA, 21 nt, Homo sapiens
ugacguuaucucugaguaauu

SEQ ID NO: 1219 - RNA, 21 nt, Homo sapiens
uuacucagagauaacgucauu

SEQ ID NO: 1220 - RNA, 21 nt, Homo sapiens
uguuuaucuaccugaaauuuu

SEQ ID NO: 1221 - RNA, 21 nt, Homo sapiens
aauuucagguagauaaacauu

SEQ ID NO: 1222 - RNA, 21 nt, Homo sapiens
cguuaucucugaguaaaguuu

SEQ ID NO: 1223 - RNA, 21 nt, Homo sapiens
acuuuacucagagauaacguu

SEQ ID NO: 1224 - RNA, 21 nt, Homo sapiens
ugguggugagcuuagaaauuu

SEQ ID NO: 1225 - RNA, 21 nt, Homo sapiens
auuucuaagcucaccaccauu

SEQ ID NO: 1226 - RNA, 21 nt, Homo sapiens
agaguagacucacacuaauuu

SEQ ID NO: 1227 - RNA, 21 nt, Homo sapiens
auuagugugagucuacucuuu

SEQ ID NO: 1228 - RNA, 21 nt, Homo sapiens
uggucaaagucuguucaaauu

SEQ ID NO: 1229 - RNA, 21 nt, Homo sapiens
uuugaacagacuuugaccauu

SEQ ID NO: 1230 - RNA, 21 nt, Homo sapiens
gucacauacucaagauguuuu

SEQ ID NO: 1231 - RNA, 21 nt, Homo sapiens
aacaucuugaguaugugacuu

SEQ ID NO: 1232 - RNA, 21 nt, Homo sapiens
agagagucaucauuacaaauu

SEQ ID NO: 1233 - RNA, 21 nt, Homo sapiens
uuuguaaugaugacucucuuu

SEQ ID NO: 1234 - RNA, 21 nt, Homo sapiens
gcuggucccuugaauuaaauu

SEQ ID NO: 1235 - RNA, 21 nt, Homo sapiens
uuuaauucaagggaccagcuu

SEQ ID NO: 1236 - RNA, 21 nt, Homo sapiens
uggcuggucccuugaauuauu

SEQ ID NO: 1237 - RNA, 21 nt, Homo sapiens
uaauucaagggaccagccauu

SEQ ID NO: 1238 - RNA, 21 nt, Homo sapiens
ggcuggucccuugaauuaauu

SEQ ID NO: 1239 - RNA, 21 nt, Homo sapiens
uuaauucaagggaccagccuu

SEQ ID NO: 1240 - RNA, 21 nt, Homo sapiens
ggcuauagcugauuggaaauu

SEQ ID NO: 1241 - RNA, 21 nt, Homo sapiens
uuuccaaucagcuauagccuu

SEQ ID NO: 1242 - RNA, 21 nt, Homo sapiens
ggaacuuuaugacagacaauu

SEQ ID NO: 1243 - RNA, 21 nt, Homo sapiens
uugucugucauaaaguuccuu

SEQ ID NO: 1244 - RNA, 21 nt, Homo sapiens
ggucccuauagcagaaauuuu

SEQ ID NO: 1245 - RNA, 21 nt, Homo sapiens
aauuucugcuauagggaccuu

SEQ ID NO: 1246 - RNA, 21 nt, Homo sapiens
gcaguccugucaguucauauu

SEQ ID NO: 1247 - RNA, 21 nt, Homo sapiens
uaugaacugacaggacugcuu

SEQ ID NO: 1248 - RNA, 21 nt, Homo sapiens
uaugaucgcaccuaugaauuu

SEQ ID NO: 1249 - RNA, 21 nt, Homo sapiens
auucauaggugcgaucauauu

SEQ ID NO: 1250 - DNA, 19 bp, Homo sapiens
ggatttatttgggtaggga

SEQ ID NO: 1251 - DNA, 19 bp, Homo sapiens
gggtatattgggtatataa

SEQ ID NO: 1252 - DNA, 19 bp, Homo sapiens
cctttaaggtcgaaccata

SEQ ID NO: 1253 - DNA, 19 bp, Homo sapiens
ctgtttagcgccagtagat

SEQ ID NO: 1254 - DNA, 19 bp, Homo sapiens
gctgtttagcgccagtaga

SEQ ID NO: 1255 - DNA, 19 bp, Homo sapiens
agagatcagtcacagcgaa

SEQ ID NO: 1256 - DNA, 19 bp, Homo sapiens
ggctcatgccagtttccaa

SEQ ID NO: 1257 - DNA, 19 bp, Homo sapiens
tgttggatttatttgggta

SEQ ID NO: 1258 - DNA, 19 bp, Homo sapiens
cggcttgttggatttattt

SEQ ID NO: 1259 - DNA, 19 bp, Homo sapiens
gaatcatgctcttgggaga

SEQ ID NO: 1260 - DNA, 19 bp, Homo sapiens
agttcaattcagtgtgatt

SEQ ID NO: 1261 - DNA, 19 bp, Homo sapiens
ggccttatccgtctgtata

SEQ ID NO: 1262 - DNA, 19 bp, Homo sapiens
agacaattgttgtcccaat

SEQ ID NO: 1263 - DNA, 19 bp, Homo sapiens
gggtatattgggtatataa

SEQ ID NO: 1264 - DNA, 19 bp, Homo sapiens
cctttaaggtcgaaccata

SEQ ID NO: 1265 - DNA, 19 bp, Homo sapiens
ctgtttagcgccagtagat

SEQ ID NO: 1266 - DNA, 19 bp, Homo sapiens
gggaattcatggaatccga

SEQ ID NO: 1267 - DNA, 19 bp, Homo sapiens
gcctaagaatcatgctctt

SEQ ID NO: 1268 - DNA, 19 bp, Homo sapiens
gctgtttagcgccagtaga

SEQ ID NO: 1269 - RNA, 19 nt, Homo sapiens
ggauuuauuuggguaggga

SEQ ID NO: 1270 - RNA, 19 nt, Homo sapiens
ucccuacccaaauaaaucc

SEQ ID NO: 1271 - RNA, 19 nt, Homo sapiens
ggguauauuggguauauaa

SEQ ID NO: 1272 - RNA, 19 nt, Homo sapiens
uuauauacccaauauaccc

SEQ ID NO: 1273 - RNA, 19 nt, Homo sapiens
ccuuuaaggucgaaccaua

SEQ ID NO: 1274 - RNA, 19 nt, Homo sapiens
uaugguucgaccuuaaagg

SEQ ID NO: 1275 - RNA, 19 nt, Homo sapiens
cuguuuagcgccaguagau

SEQ ID NO: 1276 - RNA, 19 nt, Homo sapiens
aucuacuggcgcuaaacag

SEQ ID NO: 1277 - RNA, 19 nt, Homo sapiens
gcuguuuagcgccaguaga

SEQ ID NO: 1278 - RNA, 19 nt, Homo sapiens
ucuacuggcgcuaaacagc

SEQ ID NO: 1279 - RNA, 19 nt, Homo sapiens
agagaucagucacagcgaa

SEQ ID NO: 1280 - RNA, 19 nt, Homo sapiens
uucgcugugacugaucucu

SEQ ID NO: 1281 - RNA, 19 nt, Homo sapiens
ggcucaugccaguuuccaa

SEQ ID NO: 1282 - RNA, 19 nt, Homo sapiens
uuggaaacuggcaugagcc

SEQ ID NO: 1283 - RNA, 19 nt, Homo sapiens
uguuggauuuauuugggua

SEQ ID NO: 1284 - RNA, 19 nt, Homo sapiens
uacccaaauaaauccaaca

SEQ ID NO: 1285 - RNA, 19 nt, Homo sapiens
cggcuuguuggauuuauuu

SEQ ID NO: 1286 - RNA, 19 nt, Homo sapiens
aaauaaauccaacaagccg

SEQ ID NO: 1287 - RNA, 19 nt, Homo sapiens
gaaucaugcucuugggaga

SEQ ID NO: 1288 - RNA, 19 nt, Homo sapiens
ucucccaagagcaugauuc

SEQ ID NO: 1289 - RNA, 19 nt, Homo sapiens
aguucaauucagugugauu

SEQ ID NO: 1290 - RNA, 19 nt, Homo sapiens
aaucacacugaauugaacu

SEQ ID NO: 1291 - RNA, 19 nt, Homo sapiens
ggccuuauccgucuguaua

SEQ ID NO: 1292 - RNA, 19 nt, Homo sapiens
uauacagacggauaaggcc

SEQ ID NO: 1293 - RNA, 19 nt, Homo sapiens
agacaauuguugucccaau

SEQ ID NO: 1294 - RNA, 19 nt, Homo sapiens
auugggacaacaauugucu

SEQ ID NO: 1295 - RNA, 19 nt, Homo sapiens
ggguauauuggguauauaa

SEQ ID NO: 1296 - RNA, 19 nt, Homo sapiens
uuauauacccaauauaccc

SEQ ID NO: 1297 - RNA, 19 nt, Homo sapiens
ccuuuaaggucgaaccaua

SEQ ID NO: 1298 - RNA, 19 nt, Homo sapiens
uaugguucgaccuuaaagg

SEQ ID NO: 1299 - RNA, 19 nt, Homo sapiens
cuguuuagcgccaguagau

SEQ ID NO: 1300 - RNA, 19 nt, Homo sapiens
aucuacuggcgcuaaacag

SEQ ID NO: 1301 - RNA, 19 nt, Homo sapiens
gggaauucauggaauccga

SEQ ID NO: 1302 - RNA, 19 nt, Homo sapiens
ucggauuccaugaauuccc

SEQ ID NO: 1303 - RNA, 19 nt, Homo sapiens
gccuaagaaucaugcucuu

SEQ ID NO: 1304 - RNA, 19 nt, Homo sapiens
aagagcaugauucuuaggc

SEQ ID NO: 1305 - RNA, 19 nt, Homo sapiens
gcuguuuagcgccaguaga

SEQ ID NO: 1306 - RNA, 19 nt, Homo sapiens
ucuacuggcgcuaaacagc

SEQ ID NO: 1307 - RNA, 21 nt, Homo sapiens
ggauuuauuuggguagggauu

SEQ ID NO: 1308 - RNA, 21 nt, Homo sapiens
ucccuacccaaauaaauccuu

SEQ ID NO: 1309 - RNA, 21 nt, Homo sapiens
ggguauauuggguauauaauu

SEQ ID NO: 1310 - RNA, 21 nt, Homo sapiens
uuauauacccaauauacccuu

SEQ ID NO: 1311 - RNA, 21 nt, Homo sapiens
ccuuuaaggucgaaccauauu

SEQ ID NO: 1312 - RNA, 21 nt, Homo sapiens
uaugguucgaccuuaaagguu

SEQ ID NO: 1313 - RNA, 21 nt, Homo sapiens
cuguuuagcgccaguagauuu

SEQ ID NO: 1314 - RNA, 21 nt, Homo sapiens
aucuacuggcgcuaaacaguu

SEQ ID NO: 1315 - RNA, 21 nt, Homo sapiens
gcuguuuagcgccaguagauu

SEQ ID NO: 1316 - RNA, 21 nt, Homo sapiens
ucuacuggcgcuaaacagcuu

SEQ ID NO: 1317 - RNA, 21 nt, Homo sapiens
agagaucagucacagcgaauu

SEQ ID NO: 1318 - RNA, 21 nt, Homo sapiens
uucgcugugacugaucucuuu

SEQ ID NO: 1319 - RNA, 21 nt, Homo sapiens
ggcucaugccaguuuccaauu

SEQ ID NO: 1320 - RNA, 21 nt, Homo sapiens
uuggaaacuggcaugagccuu

SEQ ID NO: 1321 - RNA, 21 nt, Homo sapiens
uguuggauuuauuuggguauu

SEQ ID NO: 1322 - RNA, 21 nt, Homo sapiens
uacccaaauaaauccaacauu

SEQ ID NO: 1323 - RNA, 21 nt, Homo sapiens
cggcuuguuggauuuauuuuu

SEQ ID NO: 1324 - RNA, 21 nt, Homo sapiens
aaauaaauccaacaagccguu

SEQ ID NO: 1325 - RNA, 21 nt, Homo sapiens
gaaucaugcucuugggagauu

SEQ ID NO: 1326 - RNA, 21 nt, Homo sapiens
ucucccaagagcaugauucuu

SEQ ID NO: 1327 - RNA, 21 nt, Homo sapiens
aguucaauucagugugauuuu

SEQ ID NO: 1328 - RNA, 21 nt, Homo sapiens
aaucacacugaauugaacuuu

SEQ ID NO: 1329 - RNA, 21 nt, Homo sapiens
ggccuuauccgucuguauauu

SEQ ID NO: 1330 - RNA, 21 nt, Homo sapiens
uauacagacggauaaggccuu

SEQ ID NO: 1331 - RNA, 21 nt, Homo sapiens
agacaauuguugucccaauuu

SEQ ID NO: 1332 - RNA, 21 nt, Homo sapiens
auugggacaacaauugucuuu

SEQ ID NO: 1333 - RNA, 21 nt, Homo sapiens
ggguauauuggguauauaauu

SEQ ID NO: 1334 - RNA, 21 nt, Homo sapiens
uuauauacccaauauacccuu

SEQ ID NO: 1335 - RNA, 21 nt, Homo sapiens
ccuuuaaggucgaaccauauu

SEQ ID NO: 1336 - RNA, 21 nt, Homo sapiens
uaugguucgaccuuaaagguu

SEQ ID NO: 1337 - RNA, 21 nt, Homo sapiens
cuguuuagcgccaguagauuu

SEQ ID NO: 1338 - RNA, 21 nt, Homo sapiens
aucuacuggcgcuaaacaguu

SEQ ID NO: 1339 - RNA, 21 nt, Homo sapiens
gggaauucauggaauccgauu

SEQ ID NO: 1340 - RNA, 21 nt, Homo sapiens
ucggauuccaugaauucccuu

SEQ ID NO: 1341 - RNA, 21 nt, Homo sapiens
gccuaagaaucaugcucuuuu

SEQ ID NO: 1342 - RNA, 21 nt, Homo sapiens
aagagcaugauucuuaggcuu

SEQ ID NO: 1343 - RNA, 21 nt, Homo sapiens
gcuguuuagcgccaguagauu

SEQ ID NO: 1344 - RNA, 21 nt, Homo sapiens
ucuacuggcgcuaaacagcuu

SEQ ID NO: 1345 - DNA, 19 bp, Homo sapiens
cgagtgtgttcctcggagt

SEQ ID NO: 1346 - DNA, 19 bp, Homo sapiens
caccgagtcagcagcgaat

SEQ ID NO: 1347 - DNA, 19 bp, Homo sapiens
gcgtcctgctcgagtgtgt

SEQ ID NO: 1348 - DNA, 19 bp, Homo sapiens
cgtcctgctcgagtgtgtt

SEQ ID NO: 1349 - DNA, 19 bp, Homo sapiens
ccgcactctgggtatcagt

SEQ ID NO: 1350 - DNA, 19 bp, Homo sapiens
gagttggtgcctcgggagt

SEQ ID NO: 1351 - DNA, 19 bp, Homo sapiens
agttggtgcctcgggagtt

SEQ ID NO: 1352 - DNA, 19 bp, Homo sapiens
ctctgcagatttggccaaa

SEQ ID NO: 1353 - DNA, 19 bp, Homo sapiens
ccgccgagcctctgaagtt

SEQ ID NO: 1354 - DNA, 19 bp, Homo sapiens
ctgaagttggcgagtccga

SEQ ID NO: 1355 - DNA, 19 bp, Homo sapiens
gagcgtcctgctcgagtgt

SEQ ID NO: 1356 - DNA, 19 bp, Homo sapiens
cgcgttccgcagagttggt

SEQ ID NO: 1357 - DNA, 19 bp, Homo sapiens
cagagttggtgcctcggga

SEQ ID NO: 1358 - DNA, 19 bp, Homo sapiens
tcgagtgtgttcctcggag

SEQ ID NO: 1359 - DNA, 19 bp, Homo sapiens
gtcctgctcgagtgtgttc

SEQ ID NO: 1360 - skipped

SEQ ID NO: 1361 - RNA, 19 nt, Homo sapiens
cgaguguguuccucggagu

SEQ ID NO: 1362 - RNA, 19 nt, Homo sapiens
acuccgaggaacacacucg

SEQ ID NO: 1363 - RNA, 19 nt, Homo sapiens
caccgagucagcagcgaau

SEQ ID NO: 1364 - RNA, 19 nt, Homo sapiens
auucgcugcugacucggug

SEQ ID NO: 1365 - RNA, 19 nt, Homo sapiens
gcguccugcucgagugugu

SEQ ID NO: 1366 - RNA, 19 nt, Homo sapiens
acacacucgagcaggacgc

SEQ ID NO: 1367 - RNA, 19 nt, Homo sapiens
cguccugcucgaguguguu

SEQ ID NO: 1368 - RNA, 19 nt, Homo sapiens
aacacacucgagcaggacg

SEQ ID NO: 1369 - RNA, 19 nt, Homo sapiens
ccgcacucuggguaucagu

SEQ ID NO: 1370 - RNA, 19 nt, Homo sapiens
acugauacccagagugcgg

SEQ ID NO: 1371 - RNA, 19 nt, Homo sapiens
gaguuggugccucgggagu

SEQ ID NO: 1372 - RNA, 19 nt, Homo sapiens
acucccgaggcaccaacuc

SEQ ID NO: 1373 - RNA, 19 nt, Homo sapiens
aguuggugccucgggaguu

SEQ ID NO: 1374 - RNA, 19 nt, Homo sapiens
aacucccgaggcaccaacu

SEQ ID NO: 1375 - RNA, 19 nt, Homo sapiens
cucugcagauuuggccaaa

SEQ ID NO: 1376 - RNA, 19 nt, Homo sapiens
uuuggccaaaucugcagag

SEQ ID NO: 1377 - RNA, 19 nt, Homo sapiens
ccgccgagccucugaaguu

SEQ ID NO: 1378 - RNA, 19 nt, Homo sapiens
aacuucagaggcucggcgg

SEQ ID NO: 1379 - RNA, 19 nt, Homo sapiens
cugaaguuggcgaguccga

SEQ ID NO: 1380 - RNA, 19 nt, Homo sapiens
ucggacucgccaacuucag

SEQ ID NO: 1381 - RNA, 19 nt, Homo sapiens
gagcguccugcucgagugu

SEQ ID NO: 1382 - RNA, 19 nt, Homo sapiens
acacucgagcaggacgcuc

SEQ ID NO: 1383 - RNA, 19 nt, Homo sapiens
cgcguuccgcagaguuggu

SEQ ID NO: 1384 - RNA, 19 nt, Homo sapiens
accaacucugcggaacgcg

SEQ ID NO: 1385 - RNA, 19 nt, Homo sapiens
cagaguuggugccucggga

SEQ ID NO: 1386 - RNA, 19 nt, Homo sapiens
ucccgaggcaccaacucug

SEQ ID NO: 1387 - RNA, 19 nt, Homo sapiens
ucgaguguguuccucggag

SEQ ID NO: 1388 - RNA, 19 nt, Homo sapiens
cuccgaggaacacacucga

SEQ ID NO: 1389 - RNA, 19 nt, Homo sapiens
guccugcucgaguguguuc

SEQ ID NO: 1390 - RNA, 19 nt, Homo sapiens
gaacacacucgagcaggac

SEQ ID NO: 1391-1392 - skipped (2 entries)

SEQ ID NO: 1393 - RNA, 21 nt, Homo sapiens
cgaguguguuccucggaguuu

SEQ ID NO: 1394 - RNA, 21 nt, Homo sapiens
acuccgaggaacacacucguu

SEQ ID NO: 1395 - RNA, 21 nt, Homo sapiens
caccgagucagcagcgaauuu

SEQ ID NO: 1396 - RNA, 21 nt, Homo sapiens
auucgcugcugacucgguguu

SEQ ID NO: 1397 - RNA, 21 nt, Homo sapiens
gcguccugcucgaguguguuu

SEQ ID NO: 1398 - RNA, 21 nt, Homo sapiens
acacacucgagcaggacgcuu

SEQ ID NO: 1399 - RNA, 21 nt, Homo sapiens
cguccugcucgaguguguuuu

SEQ ID NO: 1400 - RNA, 21 nt, Homo sapiens
aacacacucgagcaggacguu

SEQ ID NO: 1401 - RNA, 21 nt, Homo sapiens
ccgcacucuggguaucaguuu

SEQ ID NO: 1402 - RNA, 21 nt, Homo sapiens
acugauacccagagugcgguu

SEQ ID NO: 1403 - RNA, 21 nt, Homo sapiens
gaguuggugccucgggaguuu

SEQ ID NO: 1404 - RNA, 21 nt, Homo sapiens
acucccgaggcaccaacucuu

SEQ ID NO: 1405 - RNA, 21 nt, Homo sapiens
aguuggugccucgggaguuuu

SEQ ID NO: 1406 - RNA, 21 nt, Homo sapiens
aacucccgaggcaccaacuuu

SEQ ID NO: 1407 - RNA, 21 nt, Homo sapiens
cucugcagauuuggccaaauu

SEQ ID NO: 1408 - RNA, 21 nt, Homo sapiens
uuuggccaaaucugcagaguu

SEQ ID NO: 1409 - RNA, 21 nt, Homo sapiens
ccgccgagccucugaaguuuu

SEQ ID NO: 1410 - RNA, 21 nt, Homo sapiens
aacuucagaggcucggcgguu

SEQ ID NO: 1411 - RNA, 21 nt, Homo sapiens
cugaaguuggcgaguccgauu

SEQ ID NO: 1412 - RNA, 21 nt, Homo sapiens
ucggacucgccaacuucaguu

SEQ ID NO: 1413 - RNA, 21 nt, Homo sapiens
gagcguccugcucgaguguuu

SEQ ID NO: 1414 - RNA, 21 nt, Homo sapiens
acacucgagcaggacgcucuu

SEQ ID NO: 1415 - RNA, 21 nt, Homo sapiens
cgcguuccgcagaguugguuu

SEQ ID NO: 1416 - RNA, 21 nt, Homo sapiens
accaacucugcggaacgcguu

SEQ ID NO: 1417 - RNA, 21 nt, Homo sapiens
cagaguuggugccucgggauu

SEQ ID NO: 1418 - RNA, 21 nt, Homo sapiens
ucccgaggcaccaacucuguu

SEQ ID NO: 1419 - RNA, 21 nt, Homo sapiens
ucgaguguguuccucggaguu

SEQ ID NO: 1420 - RNA, 21 nt, Homo sapiens
cuccgaggaacacacucgauu

SEQ ID NO: 1421 - RNA, 21 nt, Homo sapiens
guccugcucgaguguguucuu

SEQ ID NO: 1422 - RNA, 21 nt, Homo sapiens
gaacacacucgagcaggacuu

SEQ ID NO: 1423-1424 - skipped (2 entries)

SEQ ID NO: 1425 - DNA, 19 bp, Homo sapiens
agccggagttcgaacaaat

SEQ ID NO: 1426 - DNA, 19 bp, Homo sapiens
ggcatatattcattctaat

SEQ ID NO: 1427 - DNA, 19 bp, Homo sapiens
tcgatcttcgtttgaaaca

SEQ ID NO: 1428 - DNA, 19 bp, Homo sapiens
gtacagatgtcccatgaca

SEQ ID NO: 1429 - DNA, 19 bp, Homo sapiens
ggaataaatcgatcttcgt

SEQ ID NO: 1430 - DNA, 19 bp, Homo sapiens
atattctcgctctgataca

SEQ ID NO: 1431 - DNA, 19 bp, Homo sapiens
aaatcgatcttcgtttgaa

SEQ ID NO: 1432 - DNA, 19 bp, Homo sapiens
tggtatatttccgacctga

SEQ ID NO: 1433 - DNA, 19 bp, Homo sapiens
ctctaatactttcgatact

SEQ ID NO: 1434 - DNA, 19 bp, Homo sapiens
gatcttcgtttgaaacaca

SEQ ID NO: 1435 - DNA, 19 bp, Homo sapiens
ttcatattctcgctctgat

SEQ ID NO: 1436 - RNA, 19 nt, Homo sapiens
agccggaguucgaacaaau

SEQ ID NO: 1437 - RNA, 19 nt, Homo sapiens
auuuguucgaacuccggcu

SEQ ID NO: 1438 - RNA, 19 nt, Homo sapiens
ggcauauauucauucuaau

SEQ ID NO: 1439 - RNA, 19 nt, Homo sapiens
auuagaaugaauauaugcc

SEQ ID NO: 1440 - RNA, 19 nt, Homo sapiens
ucgaucuucguuugaaaca

SEQ ID NO: 1441 - RNA, 19 nt, Homo sapiens
uguuucaaacgaagaucga

SEQ ID NO: 1442 - RNA, 19 nt, Homo sapiens
guacagaugucccaugaca

SEQ ID NO: 1443 - RNA, 19 nt, Homo sapiens
ugucaugggacaucuguac

SEQ ID NO: 1444 - RNA, 19 nt, Homo sapiens
ggaauaaaucgaucuucgu

SEQ ID NO: 1445 - RNA, 19 nt, Homo sapiens
acgaagaucgauuuauucc

SEQ ID NO: 1446 - RNA, 19 nt, Homo sapiens
auauucucgcucugauaca

SEQ ID NO: 1447 - RNA, 19 nt, Homo sapiens
uguaucagagcgagaauau

SEQ ID NO: 1448 - RNA, 19 nt, Homo sapiens
aaaucgaucuucguuugaa

SEQ ID NO: 1449 - RNA, 19 nt, Homo sapiens
uucaaacgaagaucgauuu

SEQ ID NO: 1450 - RNA, 19 nt, Homo sapiens
ugguauauuuccgaccuga

SEQ ID NO: 1451 - RNA, 19 nt, Homo sapiens
ucaggucggaaauauacca

SEQ ID NO: 1452 - RNA, 19 nt, Homo sapiens
cucuaauacuuucgauacu

SEQ ID NO: 1453 - RNA, 19 nt, Homo sapiens
aguaucgaaaguauuagag

SEQ ID NO: 1454 - RNA, 19 nt, Homo sapiens
gaucuucguuugaaacaca

SEQ ID NO: 1455 - RNA, 19 nt, Homo sapiens
uguguuucaaacgaagauc

SEQ ID NO: 1456 - RNA, 19 nt, Homo sapiens
uucauauucucgcucugau

SEQ ID NO: 1457 - RNA, 19 nt, Homo sapiens
aucagagcgagaauaugaa

SEQ ID NO: 1458 - RNA, 21 nt, Homo sapiens
agccggaguucgaacaaauuu

SEQ ID NO: 1459 - RNA, 21 nt, Homo sapiens
auuuguucgaacuccggcuuu

SEQ ID NO: 1460 - RNA, 21 nt, Homo sapiens
ggcauauauucauucuaauuu

SEQ ID NO: 1461 - RNA, 21 nt, Homo sapiens
auuagaaugaauauaugccuu

SEQ ID NO: 1462 - RNA, 21 nt, Homo sapiens
ucgaucuucguuugaaacauu

SEQ ID NO: 1463 - RNA, 21 nt, Homo sapiens
uguuucaaacgaagaucgauu

SEQ ID NO: 1464 - RNA, 21 nt, Homo sapiens
guacagaugucccaugacauu

SEQ ID NO: 1465 - RNA, 21 nt, Homo sapiens
ugucaugggacaucuguacuu

SEQ ID NO: 1466 - RNA, 21 nt, Homo sapiens
ggaauaaaucgaucuucguuu

SEQ ID NO: 1467 - RNA, 21 nt, Homo sapiens
acgaagaucgauuuauuccuu

SEQ ID NO: 1468 - RNA, 21 nt, Homo sapiens
auauucucgcucugauacauu

SEQ ID NO: 1469 - RNA, 21 nt, Homo sapiens
uguaucagagcgagaauauuu

SEQ ID NO: 1470 - RNA, 21 nt, Homo sapiens
aaaucgaucuucguuugaauu

SEQ ID NO: 1471 - RNA, 21 nt, Homo sapiens
uucaaacgaagaucgauuuuu

SEQ ID NO: 1472 - RNA, 21 nt, Homo sapiens
ugguauauuuccgaccugauu

SEQ ID NO: 1473 - RNA, 21 nt, Homo sapiens
ucaggucggaaauauaccauu

SEQ ID NO: 1474 - RNA, 21 nt, Homo sapiens
cucuaauacuuucgauacuuu

SEQ ID NO: 1475 - RNA, 21 nt, Homo sapiens
aguaucgaaaguauuagaguu

SEQ ID NO: 1476 - RNA, 21 nt, Homo sapiens
gaucuucguuugaaacacauu

SEQ ID NO: 1477 - RNA, 21 nt, Homo sapiens
uguguuucaaacgaagaucuu

SEQ ID NO: 1478 - RNA, 21 nt, Homo sapiens
uucauauucucgcucugauuu

SEQ ID NO: 1479 - RNA, 21 nt, Homo sapiens
aucagagcgagaauaugaauu

SEQ ID NO: 1480 - DNA, 19 bp, Homo sapiens
gacttagctccctgaaata

SEQ ID NO: 1481 - DNA, 19 bp, Homo sapiens
agacttagctccctgaaat

SEQ ID NO: 1482 - DNA, 19 bp, Homo sapiens
gcaagctgtgactatagaa

SEQ ID NO: 1483 - DNA, 19 bp, Homo sapiens
gtgttaagtttgtgtctca

SEQ ID NO: 1484 - DNA, 19 bp, Homo sapiens
gccttagccttgtctatat

SEQ ID NO: 1485 - DNA, 19 bp, Homo sapiens
tgctagaagtgttaagttt

SEQ ID NO: 1486 - DNA, 19 bp, Homo sapiens
cagccacgttctttaaatt

SEQ ID NO: 1487 - DNA, 19 bp, Homo sapiens
ctgaaatacgttggatagt

SEQ ID NO: 1488 - DNA, 19 bp, Homo sapiens
aagtttgtgtctcaatact

SEQ ID NO: 1489 - DNA, 19 bp, Homo sapiens
gttggatagtcgttctgtt

SEQ ID NO: 1490 - DNA, 19 bp, Homo sapiens
agagcaagattagaataaa

SEQ ID NO: 1491 - DNA, 19 bp, Homo sapiens
tgcattacagaatggtaat

SEQ ID NO: 1492 - DNA, 19 bp, Homo sapiens
gacttagctccctgaaata

SEQ ID NO: 1493 - DNA, 19 bp, Homo sapiens
agacttagctccctgaaat

SEQ ID NO: 1494 - DNA, 19 bp, Homo sapiens
gcttcaaacgtgtgtgaat

SEQ ID NO: 1495 - DNA, 19 bp, Homo sapiens
gccttagccttgtctatat

SEQ ID NO: 1496 - DNA, 19 bp, Homo sapiens
agccgtttctaaacttaat

SEQ ID NO: 1497 - DNA, 19 bp, Homo sapiens
ctgaaatacgttggatagt

SEQ ID NO: 1498 - DNA, 19 bp, Homo sapiens
gttggatagtcgttctgtt

SEQ ID NO: 1499 - DNA, 19 bp, Homo sapiens
tgccttagccttgtctata

SEQ ID NO: 1500 - DNA, 19 bp, Homo sapiens
ctagccgtttctaaactta

SEQ ID NO: 1501 - RNA, 19 nt, Homo sapiens
gacuuagcucccugaaaua

SEQ ID NO: 1502 - RNA, 19 nt, Homo sapiens
uauuucagggagcuaaguc

SEQ ID NO: 1503 - RNA, 19 nt, Homo sapiens
agacuuagcucccugaaau

SEQ ID NO: 1504 - RNA, 19 nt, Homo sapiens
auuucagggagcuaagucu

SEQ ID NO: 1505 - RNA, 19 nt, Homo sapiens
gcaagcugugacuauagaa

SEQ ID NO: 1506 - RNA, 19 nt, Homo sapiens
uucuauagucacagcuugc

SEQ ID NO: 1507 - RNA, 19 nt, Homo sapiens
guguuaaguuugugucuca

SEQ ID NO: 1508 - RNA, 19 nt, Homo sapiens
ugagacacaaacuuaacac

SEQ ID NO: 1509 - RNA, 19 nt, Homo sapiens
gccuuagccuugucuauau

SEQ ID NO: 1510 - RNA, 19 nt, Homo sapiens
auauagacaaggcuaaggc

SEQ ID NO: 1511 - RNA, 19 nt, Homo sapiens
ugcuagaaguguuaaguuu

SEQ ID NO: 1512 - RNA, 19 nt, Homo sapiens
aaacuuaacacuucuagca

SEQ ID NO: 1513 - RNA, 19 nt, Homo sapiens
cagccacguucuuuaaauu

SEQ ID NO: 1514 - RNA, 19 nt, Homo sapiens
aauuuaaagaacguggcug

SEQ ID NO: 1515 - RNA, 19 nt, Homo sapiens
cugaaauacguuggauagu

SEQ ID NO: 1516 - RNA, 19 nt, Homo sapiens
acuauccaacguauuucag

SEQ ID NO: 1517 - RNA, 19 nt, Homo sapiens
aaguuugugucucaauacu

SEQ ID NO: 1518 - RNA, 19 nt, Homo sapiens
aguauugagacacaaacuu

SEQ ID NO: 1519 - RNA, 19 nt, Homo sapiens
guuggauagucguucuguu

SEQ ID NO: 1520 - RNA, 19 nt, Homo sapiens
aacagaacgacuauccaac

SEQ ID NO: 1521 - RNA, 19 nt, Homo sapiens
agagcaagauuagaauaaa

SEQ ID NO: 1522 - RNA, 19 nt, Homo sapiens
uuuauucuaaucuugcucu

SEQ ID NO: 1523 - RNA, 19 nt, Homo sapiens
ugcauuacagaaugguaau

SEQ ID NO: 1524 - RNA, 19 nt, Homo sapiens
auuaccauucuguaaugca

SEQ ID NO: 1525 - RNA, 19 nt, Homo sapiens
gacuuagcucccugaaaua

SEQ ID NO: 1526 - RNA, 19 nt, Homo sapiens
uauuucagggagcuaaguc

SEQ ID NO: 1527 - RNA, 19 nt, Homo sapiens
agacuuagcucccugaaau

SEQ ID NO: 1528 - RNA, 19 nt, Homo sapiens
auuucagggagcuaagucu

SEQ ID NO: 1529 - RNA, 19 nt, Homo sapiens
gcuucaaacgugugugaau

SEQ ID NO: 1530 - RNA, 19 nt, Homo sapiens
auucacacacguuugaagc

SEQ ID NO: 1531 - RNA, 19 nt, Homo sapiens
gccuuagccuugucuauau

SEQ ID NO: 1532 - RNA, 19 nt, Homo sapiens
auauagacaaggcuaaggc

SEQ ID NO: 1533 - RNA, 19 nt, Homo sapiens
agccguuucuaaacuuaau

SEQ ID NO: 1534 - RNA, 19 nt, Homo sapiens
auuaaguuuagaaacggcu

SEQ ID NO: 1535 - RNA, 19 nt, Homo sapiens
cugaaauacguuggauagu

SEQ ID NO: 1536 - RNA, 19 nt, Homo sapiens
acuauccaacguauuucag

SEQ ID NO: 1537 - RNA, 19 nt, Homo sapiens
guuggauagucguucuguu

SEQ ID NO: 1538 - RNA, 19 nt, Homo sapiens
aacagaacgacuauccaac

SEQ ID NO: 1539 - RNA, 19 nt, Homo sapiens
ugccuuagccuugucuaua

SEQ ID NO: 1540 - RNA, 19 nt, Homo sapiens
uauagacaaggcuaaggca

SEQ ID NO: 1541 - RNA, 19 nt, Homo sapiens
cuagccguuucuaaacuua

SEQ ID NO: 1542 - RNA, 19 nt, Homo sapiens
uaaguuuagaaacggcuag

SEQ ID NO: 1543 - RNA, 21 nt, Homo sapiens
gacuuagcucccugaaauauu

SEQ ID NO: 1544 - RNA, 21 nt, Homo sapiens
uauuucagggagcuaagucuu

SEQ ID NO: 1545 - RNA, 21 nt, Homo sapiens
agacuuagcucccugaaauuu

SEQ ID NO: 1546 - RNA, 21 nt, Homo sapiens
auuucagggagcuaagucuuu

SEQ ID NO: 1547 - RNA, 21 nt, Homo sapiens
gcaagcugugacuauagaauu

SEQ ID NO: 1548 - RNA, 21 nt, Homo sapiens
uucuauagucacagcuugcuu

SEQ ID NO: 1549 - RNA, 21 nt, Homo sapiens
guguuaaguuugugucucauu

SEQ ID NO: 1550 - RNA, 21 nt, Homo sapiens
ugagacacaaacuuaacacuu

SEQ ID NO: 1551 - RNA, 21 nt, Homo sapiens
gccuuagccuugucuauauuu

SEQ ID NO: 1552 - RNA, 21 nt, Homo sapiens
auauagacaaggcuaaggcuu

SEQ ID NO: 1553 - RNA, 21 nt, Homo sapiens
ugcuagaaguguuaaguuuuu

SEQ ID NO: 1554 - RNA, 21 nt, Homo sapiens
aaacuuaacacuucuagcauu

SEQ ID NO: 1555 - RNA, 21 nt, Homo sapiens
cagccacguucuuuaaauuuu

SEQ ID NO: 1556 - RNA, 21 nt, Homo sapiens
aauuuaaagaacguggcuguu

SEQ ID NO: 1557 - RNA, 21 nt, Homo sapiens
cugaaauacguuggauaguuu

SEQ ID NO: 1558 - RNA, 21 nt, Homo sapiens
acuauccaacguauuucaguu

SEQ ID NO: 1559 - RNA, 21 nt, Homo sapiens
aaguuugugucucaauacuuu

SEQ ID NO: 1560 - RNA, 21 nt, Homo sapiens
aguauugagacacaaacuuuu

SEQ ID NO: 1561 - RNA, 21 nt, Homo sapiens
guuggauagucguucuguuuu

SEQ ID NO: 1562 - RNA, 21 nt, Homo sapiens
aacagaacgacuauccaacuu

SEQ ID NO: 1563 - RNA, 21 nt, Homo sapiens
agagcaagauuagaauaaauu

SEQ ID NO: 1564 - RNA, 21 nt, Homo sapiens
uuuauucuaaucuugcucuuu

SEQ ID NO: 1565 - RNA, 21 nt, Homo sapiens
ugcauuacagaaugguaauuu

SEQ ID NO: 1566 - RNA, 21 nt, Homo sapiens
auuaccauucuguaaugcauu

SEQ ID NO: 1567 - RNA, 21 nt, Homo sapiens
gacuuagcucccugaaauauu

SEQ ID NO: 1568 - RNA, 21 nt, Homo sapiens
uauuucagggagcuaagucuu

SEQ ID NO: 1569 - RNA, 21 nt, Homo sapiens
agacuuagcucccugaaauuu

SEQ ID NO: 1570 - RNA, 21 nt, Homo sapiens
auuucagggagcuaagucuuu

SEQ ID NO: 1571 - RNA, 21 nt, Homo sapiens
gcuucaaacgugugugaauuu

SEQ ID NO: 1572 - RNA, 21 nt, Homo sapiens
auucacacacguuugaagcuu

SEQ ID NO: 1573 - RNA, 21 nt, Homo sapiens
gccuuagccuugucuauauuu

SEQ ID NO: 1574 - RNA, 21 nt, Homo sapiens
auauagacaaggcuaaggcuu

SEQ ID NO: 1575 - RNA, 21 nt, Homo sapiens
agccguuucuaaacuuaauuu

SEQ ID NO: 1576 - RNA, 21 nt, Homo sapiens
auuaaguuuagaaacggcuuu

SEQ ID NO: 1577 - RNA, 21 nt, Homo sapiens
cugaaauacguuggauaguuu

SEQ ID NO: 1578 - RNA, 21 nt, Homo sapiens
acuauccaacguauuucaguu

SEQ ID NO: 1579 - RNA, 21 nt, Homo sapiens
guuggauagucguucuguuuu

SEQ ID NO: 1580 - RNA, 21 nt, Homo sapiens
aacagaacgacuauccaacuu

SEQ ID NO: 1581 - RNA, 21 nt, Homo sapiens
ugccuuagccuugucuauauu

SEQ ID NO: 1582 - RNA, 21 nt, Homo sapiens
uauagacaaggcuaaggcauu

SEQ ID NO: 1583 - RNA, 21 nt, Homo sapiens
cuagccguuucuaaacuuauu

SEQ ID NO: 1584 - RNA, 21 nt, Homo sapiens
uaaguuuagaaacggcuaguu

SEQ ID NO: 1585-1604 - skipped (20 entries)

SEQ ID NO: 1605 - DNA, 19 bp, Homo sapiens
cattccgatcgttaagatt

SEQ ID NO: 1606 - DNA, 19 bp, Homo sapiens
ggatggatttgtttccaca

SEQ ID NO: 1607 - DNA, 19 bp, Homo sapiens
acattccgatcgttaagat

SEQ ID NO: 1608 - DNA, 19 bp, Homo sapiens
tcgttaagattcaagatga

SEQ ID NO: 1609 - DNA, 19 bp, Homo sapiens
cgatcgttaagattcaaga

SEQ ID NO: 1610 - DNA, 19 bp, Homo sapiens
ctgtgtccctgagaaggta

SEQ ID NO: 1611 - DNA, 19 bp, Homo sapiens
ttccgatcgttaagattca

SEQ ID NO: 1612 - RNA, 19 nt, Homo sapiens
cauuccgaucguuaagauu

SEQ ID NO: 1613 - RNA, 19 nt, Homo sapiens
aaucuuaacgaucggaaug

SEQ ID NO: 1614 - RNA, 19 nt, Homo sapiens
ggauggauuuguuuccaca

SEQ ID NO: 1615 - RNA, 19 nt, Homo sapiens
uguggaaacaaauccaucc

SEQ ID NO: 1616 - RNA, 19 nt, Homo sapiens
acauuccgaucguuaagau

SEQ ID NO: 1617 - RNA, 19 nt, Homo sapiens
aucuuaacgaucggaaugu

SEQ ID NO: 1618 - RNA, 19 nt, Homo sapiens
ucguuaagauucaagauga

SEQ ID NO: 1619 - RNA, 19 nt, Homo sapiens
ucaucuugaaucuuaacga

SEQ ID NO: 1620 - RNA, 19 nt, Homo sapiens
cgaucguuaagauucaaga

SEQ ID NO: 1621 - RNA, 19 nt, Homo sapiens
ucuugaaucuuaacgaucg

SEQ ID NO: 1622 - RNA, 19 nt, Homo sapiens
cugugucccugagaaggua

SEQ ID NO: 1623 - RNA, 19 nt, Homo sapiens
uaccuucucagggacacag

SEQ ID NO: 1624 - RNA, 19 nt, Homo sapiens
uuccgaucguuaagauuca

SEQ ID NO: 1625 - RNA, 19 nt, Homo sapiens
ugaaucuuaacgaucggaa

SEQ ID NO: 1626 - RNA, 21 nt, Homo sapiens
cauuccgaucguuaagauuuu

SEQ ID NO: 1627 - RNA, 21 nt, Homo sapiens
aaucuuaacgaucggaauguu

SEQ ID NO: 1628 - RNA, 21 nt, Homo sapiens
ggauggauuuguuuccacauu

SEQ ID NO: 1629 - RNA, 21 nt, Homo sapiens
uguggaaacaaauccauccuu

SEQ ID NO: 1630 - RNA, 21 nt, Homo sapiens
acauuccgaucguuaagauuu

SEQ ID NO: 1631 - RNA, 21 nt, Homo sapiens
aucuuaacgaucggaauguuu

SEQ ID NO: 1632 - RNA, 21 nt, Homo sapiens
ucguuaagauucaagaugauu

SEQ ID NO: 1633 - RNA, 21 nt, Homo sapiens
ucaucuugaaucuuaacgauu

SEQ ID NO: 1634 - RNA, 21 nt, Homo sapiens
cgaucguuaagauucaagauu

SEQ ID NO: 1635 - RNA, 21 nt, Homo sapiens
ucuugaaucuuaacgaucguu

SEQ ID NO: 1636 - RNA, 21 nt, Homo sapiens
cugugucccugagaagguauu

SEQ ID NO: 1637 - RNA, 21 nt, Homo sapiens
uaccuucucagggacacaguu

SEQ ID NO: 1638 - RNA, 21 nt, Homo sapiens
uuccgaucguuaagauucauu

SEQ ID NO: 1639 - RNA, 21 nt, Homo sapiens
ugaaucuuaacgaucggaauu

SEQ ID NO: 1640 - DNA, 19 bp, Homo sapiens
ggacatgttctagaaacaa

SEQ ID NO: 1641 - DNA, 19 bp, Homo sapiens
gcgtgagttctgtggaatg

SEQ ID NO: 1642 - DNA, 19 bp, Homo sapiens
gagcgtgctatctgggaaa

SEQ ID NO: 1643 - DNA, 19 bp, Homo sapiens
cgtgagttctgtggaatgt

SEQ ID NO: 1644 - DNA, 19 bp, Homo sapiens
tgaccatgttgaggaattt

SEQ ID NO: 1645 - DNA, 19 bp, Homo sapiens
gggtctcaccgtgatattc

SEQ ID NO: 1646 - DNA, 19 bp, Homo sapiens
ggctgttatctgcatgtgt

SEQ ID NO: 1647 - DNA, 19 bp, Homo sapiens
ttgctgagttccgcaaagt

SEQ ID NO: 1648 - RNA, 19 nt, Homo sapiens
ggacauguucuagaaacaa

SEQ ID NO: 1649 - RNA, 19 nt, Homo sapiens
uuguuucuagaacaugucc

SEQ ID NO: 1650 - RNA, 19 nt, Homo sapiens
gcgugaguucuguggaaug

SEQ ID NO: 1651 - RNA, 19 nt, Homo sapiens
cauuccacagaacucacgc

SEQ ID NO: 1652 - RNA, 19 nt, Homo sapiens
gagcgugcuaucugggaaa

SEQ ID NO: 1653 - RNA, 19 nt, Homo sapiens
uuucccagauagcacgcuc

SEQ ID NO: 1654 - RNA, 19 nt, Homo sapiens
cgugaguucuguggaaugu

SEQ ID NO: 1655 - RNA, 19 nt, Homo sapiens
acauuccacagaacucacg

SEQ ID NO: 1656 - RNA, 19 nt, Homo sapiens
ugaccauguugaggaauuu

SEQ ID NO: 1657 - RNA, 19 nt, Homo sapiens
aaauuccucaacaugguca

SEQ ID NO: 1658 - RNA, 19 nt, Homo sapiens
gggucucaccgugauauuc

SEQ ID NO: 1659 - RNA, 19 nt, Homo sapiens
gaauaucacggugagaccc

SEQ ID NO: 1660 - RNA, 19 nt, Homo sapiens
ggcuguuaucugcaugugu

SEQ ID NO: 1661 - RNA, 19 nt, Homo sapiens
acacaugcagauaacagcc

SEQ ID NO: 1662 - RNA, 19 nt, Homo sapiens
uugcugaguuccgcaaagu

SEQ ID NO: 1663 - RNA, 19 nt, Homo sapiens
acuuugcggaacucagcaa

SEQ ID NO: 1664 - RNA, 21 nt, Homo sapiens
ggacauguucuagaaacaauu

SEQ ID NO: 1665 - RNA, 21 nt, Homo sapiens
uuguuucuagaacauguccuu

SEQ ID NO: 1666 - RNA, 21 nt, Homo sapiens
gcgugaguucuguggaauguu

SEQ ID NO: 1667 - RNA, 21 nt, Homo sapiens
cauuccacagaacucacgcuu

SEQ ID NO: 1668 - RNA, 21 nt, Homo sapiens
gagcgugcuaucugggaaauu

SEQ ID NO: 1669 - RNA, 21 nt, Homo sapiens
uuucccagauagcacgcucuu

SEQ ID NO: 1670 - RNA, 21 nt, Homo sapiens
cgugaguucuguggaauguuu

SEQ ID NO: 1671 - RNA, 21 nt, Homo sapiens
acauuccacagaacucacguu

SEQ ID NO: 1672 - RNA, 21 nt, Homo sapiens
ugaccauguugaggaauuuuu

SEQ ID NO: 1673 - RNA, 21 nt, Homo sapiens
aaauuccucaacauggucauu

SEQ ID NO: 1674 - RNA, 21 nt, Homo sapiens
gggucucaccgugauauucuu

SEQ ID NO: 1675 - RNA, 21 nt, Homo sapiens
gaauaucacggugagacccuu

SEQ ID NO: 1676 - RNA, 21 nt, Homo sapiens
ggcuguuaucugcauguguuu

SEQ ID NO: 1677 - RNA, 21 nt, Homo sapiens
acacaugcagauaacagccuu

SEQ ID NO: 1678 - RNA, 21 nt, Homo sapiens
uugcugaguuccgcaaaguuu

SEQ ID NO: 1679 - RNA, 21 nt, Homo sapiens
acuuugcggaacucagcaauu

SEQ ID NO: 1680 - DNA, 19 bp, Homo sapiens
atgcgtgtcctcagagtta

SEQ ID NO: 1681 - DNA, 19 bp, Homo sapiens
ggctggcctcggagaaatt

SEQ ID NO: 1682 - DNA, 19 bp, Homo sapiens
gctagtgaatgctttcaga

SEQ ID NO: 1683 - DNA, 19 bp, Homo sapiens
cggcgagtctatttaaaca

SEQ ID NO: 1684 - DNA, 19 bp, Homo sapiens
gaaaggaactcaagattaa

SEQ ID NO: 1685 - DNA, 19 bp, Homo sapiens
cgagtctccgctgatcaaa

SEQ ID NO: 1686 - DNA, 19 bp, Homo sapiens
gctggcctcggagaaatta

SEQ ID NO: 1687 - DNA, 19 bp, Homo sapiens
gcgagtctatttaaacaga

SEQ ID NO: 1688 - DNA, 19 bp, Homo sapiens
acaatattcagatgctagt

SEQ ID NO: 1689 - DNA, 19 bp, Homo sapiens
ccgagtctccgctgatcaa

SEQ ID NO: 1690 - DNA, 19 bp, Homo sapiens
tggcctcggagaaattaaa

SEQ ID NO: 1691 - RNA, 19 nt, Homo sapiens
augcguguccucagaguua

SEQ ID NO: 1692 - RNA, 19 nt, Homo sapiens
uaacucugaggacacgcau

SEQ ID NO: 1693 - RNA, 19 nt, Homo sapiens
ggcuggccucggagaaauu

SEQ ID NO: 1694 - RNA, 19 nt, Homo sapiens
aauuucuccgaggccagcc

SEQ ID NO: 1695 - RNA, 19 nt, Homo sapiens
gcuagugaaugcuuucaga

SEQ ID NO: 1696 - RNA, 19 nt, Homo sapiens
ucugaaagcauucacuagc

SEQ ID NO: 1697 - RNA, 19 nt, Homo sapiens
cggcgagucuauuuaaaca

SEQ ID NO: 1698 - RNA, 19 nt, Homo sapiens
uguuuaaauagacucgccg

SEQ ID NO: 1699 - RNA, 19 nt, Homo sapiens
gaaaggaacucaagauuaa

SEQ ID NO: 1700 - RNA, 19 nt, Homo sapiens
uuaaucuugaguuccuuuc

SEQ ID NO: 1701 - RNA, 19 nt, Homo sapiens
cgagucuccgcugaucaaa

SEQ ID NO: 1702 - RNA, 19 nt, Homo sapiens
uuugaucagcggagacucg

SEQ ID NO: 1703 - RNA, 19 nt, Homo sapiens
gcuggccucggagaaauua

SEQ ID NO: 1704 - RNA, 19 nt, Homo sapiens
uaauuucuccgaggccagc

SEQ ID NO: 1705 - RNA, 19 nt, Homo sapiens
gcgagucuauuuaaacaga

SEQ ID NO: 1706 - RNA, 19 nt, Homo sapiens
ucuguuuaaauagacucgc

SEQ ID NO: 1707 - RNA, 19 nt, Homo sapiens
acaauauucagaugcuagu

SEQ ID NO: 1708 - RNA, 19 nt, Homo sapiens
acuagcaucugaauauugu

SEQ ID NO: 1709 - RNA, 19 nt, Homo sapiens
ccgagucuccgcugaucaa

SEQ ID NO: 1710 - RNA, 19 nt, Homo sapiens
uugaucagcggagacucgg

SEQ ID NO: 1711 - RNA, 19 nt, Homo sapiens
uggccucggagaaauuaaa

SEQ ID NO: 1712 - RNA, 19 nt, Homo sapiens
uuuaauuucuccgaggcca

SEQ ID NO: 1713 - RNA, 21 nt, Homo sapiens
augcguguccucagaguuauu

SEQ ID NO: 1714 - RNA, 21 nt, Homo sapiens
uaacucugaggacacgcauuu

SEQ ID NO: 1715 - RNA, 21 nt, Homo sapiens
ggcuggccucggagaaauuuu

SEQ ID NO: 1716 - RNA, 21 nt, Homo sapiens
aauuucuccgaggccagccuu

SEQ ID NO: 1717 - RNA, 21 nt, Homo sapiens
gcuagugaaugcuuucagauu

SEQ ID NO: 1718 - RNA, 21 nt, Homo sapiens
ucugaaagcauucacuagcuu

SEQ ID NO: 1719 - RNA, 21 nt, Homo sapiens
cggcgagucuauuuaaacauu

SEQ ID NO: 1720 - RNA, 21 nt, Homo sapiens
uguuuaaauagacucgccguu

SEQ ID NO: 1721 - RNA, 21 nt, Homo sapiens
gaaaggaacucaagauuaauu

SEQ ID NO: 1722 - RNA, 21 nt, Homo sapiens
uuaaucuugaguuccuuucuu

SEQ ID NO: 1723 - RNA, 21 nt, Homo sapiens
cgagucuccgcugaucaaauu

SEQ ID NO: 1724 - RNA, 21 nt, Homo sapiens
uuugaucagcggagacucguu

SEQ ID NO: 1725 - RNA, 21 nt, Homo sapiens
gcuggccucggagaaauuauu

SEQ ID NO: 1726 - RNA, 21 nt, Homo sapiens
uaauuucuccgaggccagcuu

SEQ ID NO: 1727 - RNA, 21 nt, Homo sapiens
gcgagucuauuuaaacagauu

SEQ ID NO: 1728 - RNA, 21 nt, Homo sapiens
ucuguuuaaauagacucgcuu

SEQ ID NO: 1729 - RNA, 21 nt, Homo sapiens
acaauauucagaugcuaguuu

SEQ ID NO: 1730 - RNA, 21 nt, Homo sapiens
acuagcaucugaauauuguuu

SEQ ID NO: 1731 - RNA, 21 nt, Homo sapiens
ccgagucuccgcugaucaauu

SEQ ID NO: 1732 - RNA, 21 nt, Homo sapiens
uugaucagcggagacucgguu

SEQ ID NO: 1733 - RNA, 21 nt, Homo sapiens
uggccucggagaaauuaaauu

SEQ ID NO: 1734 - RNA, 21 nt, Homo sapiens
uuuaauuucuccgaggccauu

SEQ ID NO: 1735 - DNA, 19 bp, Homo sapiens
aattgaggtatacgaaatt

SEQ ID NO: 1736 - DNA, 19 bp, Homo sapiens
gtttcatcttgttagtaca

SEQ ID NO: 1737 - DNA, 19 bp, Homo sapiens
agcggcactatctgtaata

SEQ ID NO: 1738 - DNA, 19 bp, Homo sapiens
cgaaatttagtttatcact

SEQ ID NO: 1739 - DNA, 19 bp, Homo sapiens
cggcactatctgtaatact

SEQ ID NO: 1740 - DNA, 19 bp, Homo sapiens
ggagacaagtcaggactta

SEQ ID NO: 1741 - DNA, 19 bp, Homo sapiens
gtatactcatgctgtggaa

SEQ ID NO: 1742 - DNA, 19 bp, Homo sapiens
aactggaaatcatgaaaca

SEQ ID NO: 1743 - DNA, 19 bp, Homo sapiens
tggagttgtacccaaatga

SEQ ID NO: 1744 - DNA, 19 bp, Homo sapiens
ttgatgcggtctcataaat

SEQ ID NO: 1745 - DNA, 19 bp, Homo sapiens
gttgtacccaaatgagtta

SEQ ID NO: 1746 - DNA, 19 bp, Homo sapiens
aaagtttgggtttgttaat

SEQ ID NO: 1747 - DNA, 19 bp, Homo sapiens
ggagacaagtcaggactta

SEQ ID NO: 1748 - DNA, 19 bp, Homo sapiens
ggtggaaactgcgacaaat

SEQ ID NO: 1749 - DNA, 19 bp, Homo sapiens
gtttgggtttgttaatcta

SEQ ID NO: 1750 - DNA, 19 bp, Homo sapiens
gctccatctttccgacaca

SEQ ID NO: 1751 - DNA, 19 bp, Homo sapiens
aaggtttggcgctgtgaca

SEQ ID NO: 1752 - RNA, 19 nt, Homo sapiens
aauugagguauacgaaauu

SEQ ID NO: 1753 - RNA, 19 nt, Homo sapiens
aauuucguauaccucaauu

SEQ ID NO: 1754 - RNA, 19 nt, Homo sapiens
guuucaucuuguuaguaca

SEQ ID NO: 1755 - RNA, 19 nt, Homo sapiens
uguacuaacaagaugaaac

SEQ ID NO: 1756 - RNA, 19 nt, Homo sapiens
agcggcacuaucuguaaua

SEQ ID NO: 1757 - RNA, 19 nt, Homo sapiens
uauuacagauagugccgcu

SEQ ID NO: 1758 - RNA, 19 nt, Homo sapiens
cgaaauuuaguuuaucacu

SEQ ID NO: 1759 - RNA, 19 nt, Homo sapiens
agugauaaacuaaauuucg

SEQ ID NO: 1760 - RNA, 19 nt, Homo sapiens
cggcacuaucuguaauacu

SEQ ID NO: 1761 - RNA, 19 nt, Homo sapiens
aguauuacagauagugccg

SEQ ID NO: 1762 - RNA, 19 nt, Homo sapiens
ggagacaagucaggacuua

SEQ ID NO: 1763 - RNA, 19 nt, Homo sapiens
uaaguccugacuugucucc

SEQ ID NO: 1764 - RNA, 19 nt, Homo sapiens
guauacucaugcuguggaa

SEQ ID NO: 1765 - RNA, 19 nt, Homo sapiens
uuccacagcaugaguauac

SEQ ID NO: 1766 - RNA, 19 nt, Homo sapiens
aacuggaaaucaugaaaca

SEQ ID NO: 1767 - RNA, 19 nt, Homo sapiens
uguuucaugauuuccaguu

SEQ ID NO: 1768 - RNA, 19 nt, Homo sapiens
uggaguuguacccaaauga

SEQ ID NO: 1769 - RNA, 19 nt, Homo sapiens
ucauuuggguacaacucca

SEQ ID NO: 1770 - RNA, 19 nt, Homo sapiens
uugaugcggucucauaaau

SEQ ID NO: 1771 - RNA, 19 nt, Homo sapiens
auuuaugagaccgcaucaa

SEQ ID NO: 1772 - RNA, 19 nt, Homo sapiens
guuguacccaaaugaguua

SEQ ID NO: 1773 - RNA, 19 nt, Homo sapiens
uaacucauuuggguacaac

SEQ ID NO: 1774 - RNA, 19 nt, Homo sapiens
aaaguuuggguuuguuaau

SEQ ID NO: 1775 - RNA, 19 nt, Homo sapiens
auuaacaaacccaaacuuu

SEQ ID NO: 1776 - RNA, 19 nt, Homo sapiens
ggagacaagucaggacuua

SEQ ID NO: 1777 - RNA, 19 nt, Homo sapiens
uaaguccugacuugucucc

SEQ ID NO: 1778 - RNA, 19 nt, Homo sapiens
gguggaaacugcgacaaau

SEQ ID NO: 1779 - RNA, 19 nt, Homo sapiens
auuugucgcaguuuccacc

SEQ ID NO: 1780 - RNA, 19 nt, Homo sapiens
guuuggguuuguuaaucua

SEQ ID NO: 1781 - RNA, 19 nt, Homo sapiens
uagauuaacaaacccaaac

SEQ ID NO: 1782 - RNA, 19 nt, Homo sapiens
gcuccaucuuuccgacaca

SEQ ID NO: 1783 - RNA, 19 nt, Homo sapiens
ugugucggaaagauggagc

SEQ ID NO: 1784 - RNA, 19 nt, Homo sapiens
aagguuuggcgcugugaca

SEQ ID NO: 1785 - RNA, 19 nt, Homo sapiens
ugucacagcgccaaaccuu

SEQ ID NO: 1786 - RNA, 21 nt, Homo sapiens
aauugagguauacgaaauuuu

SEQ ID NO: 1787 - RNA, 21 nt, Homo sapiens
aauuucguauaccucaauuuu

SEQ ID NO: 1788 - RNA, 21 nt, Homo sapiens
guuucaucuuguuaguacauu

SEQ ID NO: 1789 - RNA, 21 nt, Homo sapiens
uguacuaacaagaugaaacuu

SEQ ID NO: 1790 - RNA, 21 nt, Homo sapiens
agcggcacuaucuguaauauu

SEQ ID NO: 1791 - RNA, 21 nt, Homo sapiens
uauuacagauagugccgcuuu

SEQ ID NO: 1792 - RNA, 21 nt, Homo sapiens
cgaaauuuaguuuaucacuuu

SEQ ID NO: 1793 - RNA, 21 nt, Homo sapiens
agugauaaacuaaauuucguu

SEQ ID NO: 1794 - RNA, 21 nt, Homo sapiens
cggcacuaucuguaauacuuu

SEQ ID NO: 1795 - RNA, 21 nt, Homo sapiens
aguauuacagauagugccguu

SEQ ID NO: 1796 - RNA, 21 nt, Homo sapiens
ggagacaagucaggacuuauu

SEQ ID NO: 1797 - RNA, 21 nt, Homo sapiens
uaaguccugacuugucuccuu

SEQ ID NO: 1798 - RNA, 21 nt, Homo sapiens
guauacucaugcuguggaauu

SEQ ID NO: 1799 - RNA, 21 nt, Homo sapiens
uuccacagcaugaguauacuu

SEQ ID NO: 1800 - RNA, 21 nt, Homo sapiens
aacuggaaaucaugaaacauu

SEQ ID NO: 1801 - RNA, 21 nt, Homo sapiens
uguuucaugauuuccaguuuu

SEQ ID NO: 1802 - RNA, 21 nt, Homo sapiens
uggaguuguacccaaaugauu

SEQ ID NO: 1803 - RNA, 21 nt, Homo sapiens
ucauuuggguacaacuccauu

SEQ ID NO: 1804 - RNA, 21 nt, Homo sapiens
uugaugcggucucauaaauuu

SEQ ID NO: 1805 - RNA, 21 nt, Homo sapiens
auuuaugagaccgcaucaauu

SEQ ID NO: 1806 - RNA, 21 nt, Homo sapiens
guuguacccaaaugaguuauu

SEQ ID NO: 1807 - RNA, 21 nt, Homo sapiens
uaacucauuuggguacaacuu

SEQ ID NO: 1808 - RNA, 21 nt, Homo sapiens
aaaguuuggguuuguuaauuu

SEQ ID NO: 1809 - RNA, 21 nt, Homo sapiens
auuaacaaacccaaacuuuuu

SEQ ID NO: 1810 - RNA, 21 nt, Homo sapiens
ggagacaagucaggacuuauu

SEQ ID NO: 1811 - RNA, 21 nt, Homo sapiens
uaaguccugacuugucuccuu

SEQ ID NO: 1812 - RNA, 21 nt, Homo sapiens
gguggaaacugcgacaaauuu

SEQ ID NO: 1813 - RNA, 21 nt, Homo sapiens
auuugucgcaguuuccaccuu

SEQ ID NO: 1814 - RNA, 21 nt, Homo sapiens
guuuggguuuguuaaucuauu

SEQ ID NO: 1815 - RNA, 21 nt, Homo sapiens
uagauuaacaaacccaaacuu

SEQ ID NO: 1816 - RNA, 21 nt, Homo sapiens
gcuccaucuuuccgacacauu

SEQ ID NO: 1817 - RNA, 21 nt, Homo sapiens
ugugucggaaagauggagcuu

SEQ ID NO: 1818 - RNA, 21 nt, Homo sapiens
aagguuuggcgcugugacauu

SEQ ID NO: 1819 - RNA, 21 nt, Homo sapiens
ugucacagcgccaaaccuuuu

SEQ ID NO: 1820 - DNA, 19 bp, Homo sapiens
gcgagttctggccggaaat

SEQ ID NO: 1821 - DNA, 19 bp, Homo sapiens
gagttctggccggaaatca

SEQ ID NO: 1822 - DNA, 19 bp, Homo sapiens
agcgagttctggccggaaa

SEQ ID NO: 1823 - DNA, 19 bp, Homo sapiens
gcctgagtttatcgctgaa

SEQ ID NO: 1824 - DNA, 19 bp, Homo sapiens
gcctgaagtgcccattata

SEQ ID NO: 1825 - DNA, 19 bp, Homo sapiens
cgagttctggccggaaatc

SEQ ID NO: 1826 - DNA, 19 bp, Homo sapiens
aggacttgcctgagtttat

SEQ ID NO: 1827 - DNA, 19 bp, Homo sapiens
cgattatttcattgttgta

SEQ ID NO: 1828 - DNA, 19 bp, Homo sapiens
agctacttgtgagaagtaa

SEQ ID NO: 1829 - DNA, 19 bp, Homo sapiens
tgggagttcctgagactca

SEQ ID NO: 1830 - DNA, 19 bp, Homo sapiens
tcatgagctacttgtgaga

SEQ ID NO: 1831 - DNA, 19 bp, Homo sapiens
gttgagtgcttagaacaga

SEQ ID NO: 1832 - DNA, 19 bp, Homo sapiens
aatagtgtttggtgcaatt

SEQ ID NO: 1833 - DNA, 19 bp, Homo sapiens
gtaatagtgtttggtgcaa

SEQ ID NO: 1834 - RNA, 19 nt, Homo sapiens
gcgaguucuggccggaaau

SEQ ID NO: 1835 - RNA, 19 nt, Homo sapiens
auuuccggccagaacucgc

SEQ ID NO: 1836 - RNA, 19 nt, Homo sapiens
gaguucuggccggaaauca

SEQ ID NO: 1837 - RNA, 19 nt, Homo sapiens
ugauuuccggccagaacuc

SEQ ID NO: 1838 - RNA, 19 nt, Homo sapiens
agcgaguucuggccggaaa

SEQ ID NO: 1839 - RNA, 19 nt, Homo sapiens
uuuccggccagaacucgcu

SEQ ID NO: 1840 - RNA, 19 nt, Homo sapiens
gccugaguuuaucgcugaa

SEQ ID NO: 1841 - RNA, 19 nt, Homo sapiens
uucagcgauaaacucaggc

SEQ ID NO: 1842 - RNA, 19 nt, Homo sapiens
gccugaagugcccauuaua

SEQ ID NO: 1843 - RNA, 19 nt, Homo sapiens
uauaaugggcacuucaggc

SEQ ID NO: 1844 - RNA, 19 nt, Homo sapiens
cgaguucuggccggaaauc

SEQ ID NO: 1845 - RNA, 19 nt, Homo sapiens
gauuuccggccagaacucg

SEQ ID NO: 1846 - RNA, 19 nt, Homo sapiens
aggacuugccugaguuuau

SEQ ID NO: 1847 - RNA, 19 nt, Homo sapiens
auaaacucaggcaaguccu

SEQ ID NO: 1848 - RNA, 19 nt, Homo sapiens
cgauuauuucauuguugua

SEQ ID NO: 1849 - RNA, 19 nt, Homo sapiens
uacaacaaugaaauaaucg

SEQ ID NO: 1850 - RNA, 19 nt, Homo sapiens
agcuacuugugagaaguaa

SEQ ID NO: 1851 - RNA, 19 nt, Homo sapiens
uuacuucucacaaguagcu

SEQ ID NO: 1852 - RNA, 19 nt, Homo sapiens
ugggaguuccugagacuca

SEQ ID NO: 1853 - RNA, 19 nt, Homo sapiens
ugagucucaggaacuccca

SEQ ID NO: 1854 - RNA, 19 nt, Homo sapiens
ucaugagcuacuugugaga

SEQ ID NO: 1855 - RNA, 19 nt, Homo sapiens
ucucacaaguagcucauga

SEQ ID NO: 1856 - RNA, 19 nt, Homo sapiens
guugagugcuuagaacaga

SEQ ID NO: 1857 - RNA, 19 nt, Homo sapiens
ucuguucuaagcacucaac

SEQ ID NO: 1858 - RNA, 19 nt, Homo sapiens
aauaguguuuggugcaauu

SEQ ID NO: 1859 - RNA, 19 nt, Homo sapiens
aauugcaccaaacacuauu

SEQ ID NO: 1860 - RNA, 19 nt, Homo sapiens
guaauaguguuuggugcaa

SEQ ID NO: 1861 - RNA, 19 nt, Homo sapiens
uugcaccaaacacuauuac

SEQ ID NO: 1862 - RNA, 21 nt, Homo sapiens
gcgaguucuggccggaaauuu

SEQ ID NO: 1863 - RNA, 21 nt, Homo sapiens
auuuccggccagaacucgcuu

SEQ ID NO: 1864 - RNA, 21 nt, Homo sapiens
gaguucuggccggaaaucauu

SEQ ID NO: 1865 - RNA, 21 nt, Homo sapiens
ugauuuccggccagaacucuu

SEQ ID NO: 1866 - RNA, 21 nt, Homo sapiens
agcgaguucuggccggaaauu

SEQ ID NO: 1867 - RNA, 21 nt, Homo sapiens
uuuccggccagaacucgcuuu

SEQ ID NO: 1868 - RNA, 21 nt, Homo sapiens
gccugaguuuaucgcugaauu

SEQ ID NO: 1869 - RNA, 21 nt, Homo sapiens
uucagcgauaaacucaggcuu

SEQ ID NO: 1870 - RNA, 21 nt, Homo sapiens
gccugaagugcccauuauauu

SEQ ID NO: 1871 - RNA, 21 nt, Homo sapiens
uauaaugggcacuucaggcuu

SEQ ID NO: 1872 - RNA, 21 nt, Homo sapiens
cgaguucuggccggaaaucuu

SEQ ID NO: 1873 - RNA, 21 nt, Homo sapiens
gauuuccggccagaacucguu

SEQ ID NO: 1874 - RNA, 21 nt, Homo sapiens
aggacuugccugaguuuauuu

SEQ ID NO: 1875 - RNA, 21 nt, Homo sapiens
auaaacucaggcaaguccuuu

SEQ ID NO: 1876 - RNA, 21 nt, Homo sapiens
cgauuauuucauuguuguauu

SEQ ID NO: 1877 - RNA, 21 nt, Homo sapiens
uacaacaaugaaauaaucguu

SEQ ID NO: 1878 - RNA, 21 nt, Homo sapiens
agcuacuugugagaaguaauu

SEQ ID NO: 1879 - RNA, 21 nt, Homo sapiens
uuacuucucacaaguagcuuu

SEQ ID NO: 1880 - RNA, 21 nt, Homo sapiens
ugggaguuccugagacucauu

SEQ ID NO: 1881 - RNA, 21 nt, Homo sapiens
ugagucucaggaacucccauu

SEQ ID NO: 1882 - RNA, 21 nt, Homo sapiens
ucaugagcuacuugugagauu

SEQ ID NO: 1883 - RNA, 21 nt, Homo sapiens
ucucacaaguagcucaugauu

SEQ ID NO: 1884 - RNA, 21 nt, Homo sapiens
guugagugcuuagaacagauu

SEQ ID NO: 1885 - RNA, 21 nt, Homo sapiens
ucuguucuaagcacucaacuu

SEQ ID NO: 1886 - RNA, 21 nt, Homo sapiens
aauaguguuuggugcaauuuu

SEQ ID NO: 1887 - RNA, 21 nt, Homo sapiens
aauugcaccaaacacuauuuu

SEQ ID NO: 1888 - RNA, 21 nt, Homo sapiens
guaauaguguuuggugcaauu

SEQ ID NO: 1889 - RNA, 21 nt, Homo sapiens
uugcaccaaacacuauuacuu

SEQ ID NO: 1890 - DNA, 19 bp, Homo sapiens
agcaatcatgcgagtcaaa

SEQ ID NO: 1891 - DNA, 19 bp, Homo sapiens
agtcaaatctcaagactgt

SEQ ID NO: 1892 - DNA, 19 bp, Homo sapiens
ctgagaagtgccgggaata

SEQ ID NO: 1893 - DNA, 19 bp, Homo sapiens
gggtgtggatgtaaatatt

SEQ ID NO: 1894 - DNA, 19 bp, Homo sapiens
caaatacgatctagaattc

SEQ ID NO: 1895 - DNA, 19 bp, Homo sapiens
tagcaatcatgcgagtcaa

SEQ ID NO: 1896 - DNA, 19 bp, Homo sapiens
gggttctcagaatgtggaa

SEQ ID NO: 1897 - DNA, 19 bp, Homo sapiens
atgctggtttctagaagga

SEQ ID NO: 1898 - DNA, 19 bp, Homo sapiens
agatttaaactgcagatga

SEQ ID NO: 1899 - RNA, 19 nt, Homo sapiens
agcaaucaugcgagucaaa

SEQ ID NO: 1900 - RNA, 19 nt, Homo sapiens
uuugacucgcaugauugcu

SEQ ID NO: 1901 - RNA, 19 nt, Homo sapiens
agucaaaucucaagacugu

SEQ ID NO: 1902 - RNA, 19 nt, Homo sapiens
acagucuugagauuugacu

SEQ ID NO: 1903 - RNA, 19 nt, Homo sapiens
cugagaagugccgggaaua

SEQ ID NO: 1904 - RNA, 19 nt, Homo sapiens
uauucccggcacuucucag

SEQ ID NO: 1905 - RNA, 19 nt, Homo sapiens
ggguguggauguaaauauu

SEQ ID NO: 1906 - RNA, 19 nt, Homo sapiens
aauauuuacauccacaccc

SEQ ID NO: 1907 - RNA, 19 nt, Homo sapiens
caaauacgaucuagaauuc

SEQ ID NO: 1908 - RNA, 19 nt, Homo sapiens
gaauucuagaucguauuug

SEQ ID NO: 1909 - RNA, 19 nt, Homo sapiens
uagcaaucaugcgagucaa

SEQ ID NO: 1910 - RNA, 19 nt, Homo sapiens
uugacucgcaugauugcua

SEQ ID NO: 1911 - RNA, 19 nt, Homo sapiens
ggguucucagaauguggaa

SEQ ID NO: 1912 - RNA, 19 nt, Homo sapiens
uuccacauucugagaaccc

SEQ ID NO: 1913 - RNA, 19 nt, Homo sapiens
augcugguuucuagaagga

SEQ ID NO: 1914 - RNA, 19 nt, Homo sapiens
uccuucuagaaaccagcau

SEQ ID NO: 1915 - RNA, 19 nt, Homo sapiens
agauuuaaacugcagauga

SEQ ID NO: 1916 - RNA, 19 nt, Homo sapiens
ucaucugcaguuuaaaucu

SEQ ID NO: 1917 - RNA, 21 nt, Homo sapiens
agcaaucaugcgagucaaauu

SEQ ID NO: 1918 - RNA, 21 nt, Homo sapiens
uuugacucgcaugauugcuuu

SEQ ID NO: 1919 - RNA, 21 nt, Homo sapiens
agucaaaucucaagacuguuu

SEQ ID NO: 1920 - RNA, 21 nt, Homo sapiens
acagucuugagauuugacuuu

SEQ ID NO: 1921 - RNA, 21 nt, Homo sapiens
cugagaagugccgggaauauu

SEQ ID NO: 1922 - RNA, 21 nt, Homo sapiens
uauucccggcacuucucaguu

SEQ ID NO: 1923 - RNA, 21 nt, Homo sapiens
ggguguggauguaaauauuuu

SEQ ID NO: 1924 - RNA, 21 nt, Homo sapiens
aauauuuacauccacacccuu

SEQ ID NO: 1925 - RNA, 21 nt, Homo sapiens
caaauacgaucuagaauucuu

SEQ ID NO: 1926 - RNA, 21 nt, Homo sapiens
gaauucuagaucguauuuguu

SEQ ID NO: 1927 - RNA, 21 nt, Homo sapiens
uagcaaucaugcgagucaauu

SEQ ID NO: 1928 - RNA, 21 nt, Homo sapiens
uugacucgcaugauugcuauu

SEQ ID NO: 1929 - RNA, 21 nt, Homo sapiens
ggguucucagaauguggaauu

SEQ ID NO: 1930 - RNA, 21 nt, Homo sapiens
uuccacauucugagaacccuu

SEQ ID NO: 1931 - RNA, 21 nt, Homo sapiens
augcugguuucuagaaggauu

SEQ ID NO: 1932 - RNA, 21 nt, Homo sapiens
uccuucuagaaaccagcauuu

SEQ ID NO: 1933 - RNA, 21 nt, Homo sapiens
agauuuaaacugcagaugauu

SEQ ID NO: 1934 - RNA, 21 nt, Homo sapiens
ucaucugcaguuuaaaucuuu

SEQ ID NO: 1935 - DNA, 19 bp, Homo sapiens
ggcataagtctgctttaat

SEQ ID NO: 1936 - DNA, 19 bp, Homo sapiens
acaggagactcttacataa

SEQ ID NO: 1937 - DNA, 19 bp, Homo sapiens
ccgagatcactttgcatat

SEQ ID NO: 1938 - DNA, 19 bp, Homo sapiens
tagattgctttctatgaaa

SEQ ID NO: 1939 - DNA, 19 bp, Homo sapiens
gggcataagtctgctttaa

SEQ ID NO: 1940 - DNA, 19 bp, Homo sapiens
cgagatcactttgcatata

SEQ ID NO: 1941 - DNA, 19 bp, Homo sapiens
tgtcgaagattctagaatt

SEQ ID NO: 1942 - DNA, 19 bp, Homo sapiens
agcatttctgctaataaca

SEQ ID NO: 1943 - DNA, 19 bp, Homo sapiens
tggagagctctatttgcat

SEQ ID NO: 1944 - DNA, 19 bp, Homo sapiens
ggatatatctctttacatc

SEQ ID NO: 1945 - DNA, 19 bp, Homo sapiens
gctctatttgcatgactta

SEQ ID NO: 1946 - DNA, 19 bp, Homo sapiens
gggacaacagtctagaaat

SEQ ID NO: 1947 - DNA, 19 bp, Homo sapiens
acgagtttcgtttgggtca

SEQ ID NO: 1948 - DNA, 19 bp, Homo sapiens
tctagaaatgcgcagacat

SEQ ID NO: 1949 - DNA, 19 bp, Homo sapiens
tcacgagtttcgtttgggt

SEQ ID NO: 1950 - DNA, 19 bp, Homo sapiens
cgagtttcgtttgggtcat

SEQ ID NO: 1951 - DNA, 19 bp, Homo sapiens
ctagaaatgcgcagacatg

SEQ ID NO: 1952 - RNA, 19 nt, Homo sapiens
ggcauaagucugcuuuaau

SEQ ID NO: 1953 - RNA, 19 nt, Homo sapiens
auuaaagcagacuuaugcc

SEQ ID NO: 1954 - RNA, 19 nt, Homo sapiens
acaggagacucuuacauaa

SEQ ID NO: 1955 - RNA, 19 nt, Homo sapiens
uuauguaagagucuccugu

SEQ ID NO: 1956 - RNA, 19 nt, Homo sapiens
ccgagaucacuuugcauau

SEQ ID NO: 1957 - RNA, 19 nt, Homo sapiens
auaugcaaagugaucucgg

SEQ ID NO: 1958 - RNA, 19 nt, Homo sapiens
uagauugcuuucuaugaaa

SEQ ID NO: 1959 - RNA, 19 nt, Homo sapiens
uuucauagaaagcaaucua

SEQ ID NO: 1960 - RNA, 19 nt, Homo sapiens
gggcauaagucugcuuuaa

SEQ ID NO: 1961 - RNA, 19 nt, Homo sapiens
uuaaagcagacuuaugccc

SEQ ID NO: 1962 - RNA, 19 nt, Homo sapiens
cgagaucacuuugcauaua

SEQ ID NO: 1963 - RNA, 19 nt, Homo sapiens
uauaugcaaagugaucucg

SEQ ID NO: 1964 - RNA, 19 nt, Homo sapiens
ugucgaagauucuagaauu

SEQ ID NO: 1965 - RNA, 19 nt, Homo sapiens
aauucuagaaucuucgaca

SEQ ID NO: 1966 - RNA, 19 nt, Homo sapiens
agcauuucugcuaauaaca

SEQ ID NO: 1967 - RNA, 19 nt, Homo sapiens
uguuauuagcagaaaugcu

SEQ ID NO: 1968 - RNA, 19 nt, Homo sapiens
uggagagcucuauuugcau

SEQ ID NO: 1969 - RNA, 19 nt, Homo sapiens
augcaaauagagcucucca

SEQ ID NO: 1970 - RNA, 19 nt, Homo sapiens
ggauauaucucuuuacauc

SEQ ID NO: 1971 - RNA, 19 nt, Homo sapiens
gauguaaagagauauaucc

SEQ ID NO: 1972 - RNA, 19 nt, Homo sapiens
gcucuauuugcaugacuua

SEQ ID NO: 1973 - RNA, 19 nt, Homo sapiens
uaagucaugcaaauagagc

SEQ ID NO: 1974 - RNA, 19 nt, Homo sapiens
gggacaacagucuagaaau

SEQ ID NO: 1975 - RNA, 19 nt, Homo sapiens
auuucuagacuguuguccc

SEQ ID NO: 1976 - RNA, 19 nt, Homo sapiens
acgaguuucguuuggguca

SEQ ID NO: 1977 - RNA, 19 nt, Homo sapiens
ugacccaaacgaaacucgu

SEQ ID NO: 1978 - RNA, 19 nt, Homo sapiens
ucuagaaaugcgcagacau

SEQ ID NO: 1979 - RNA, 19 nt, Homo sapiens
augucugcgcauuucuaga

SEQ ID NO: 1980 - RNA, 19 nt, Homo sapiens
ucacgaguuucguuugggu

SEQ ID NO: 1981 - RNA, 19 nt, Homo sapiens
acccaaacgaaacucguga

SEQ ID NO: 1982 - RNA, 19 nt, Homo sapiens
cgaguuucguuugggucau

SEQ ID NO: 1983 - RNA, 19 nt, Homo sapiens
augacccaaacgaaacucg

SEQ ID NO: 1984 - RNA, 19 nt, Homo sapiens
cuagaaaugcgcagacaug

SEQ ID NO: 1985 - RNA, 19 nt, Homo sapiens
caugucugcgcauuucuag

SEQ ID NO: 1986 - RNA, 21 nt, Homo sapiens
ggcauaagucugcuuuaauuu

SEQ ID NO: 1987 - RNA, 21 nt, Homo sapiens
auuaaagcagacuuaugccuu

SEQ ID NO: 1988 - RNA, 21 nt, Homo sapiens
acaggagacucuuacauaauu

SEQ ID NO: 1989 - RNA, 21 nt, Homo sapiens
uuauguaagagucuccuguuu

SEQ ID NO: 1990 - RNA, 21 nt, Homo sapiens
ccgagaucacuuugcauauuu

SEQ ID NO: 1991 - RNA, 21 nt, Homo sapiens
auaugcaaagugaucucgguu

SEQ ID NO: 1992 - RNA, 21 nt, Homo sapiens
uagauugcuuucuaugaaauu

SEQ ID NO: 1993 - RNA, 21 nt, Homo sapiens
uuucauagaaagcaaucuauu

SEQ ID NO: 1994 - RNA, 21 nt, Homo sapiens
gggcauaagucugcuuuaauu

SEQ ID NO: 1995 - RNA, 21 nt, Homo sapiens
uuaaagcagacuuaugcccuu

SEQ ID NO: 1996 - RNA, 21 nt, Homo sapiens
cgagaucacuuugcauauauu

SEQ ID NO: 1997 - RNA, 21 nt, Homo sapiens
uauaugcaaagugaucucguu

SEQ ID NO: 1998 - RNA, 21 nt, Homo sapiens
ugucgaagauucuagaauuuu

SEQ ID NO: 1999 - RNA, 21 nt, Homo sapiens
aauucuagaaucuucgacauu

SEQ ID NO: 2000 - RNA, 21 nt, Homo sapiens
agcauuucugcuaauaacauu

SEQ ID NO: 2001 - RNA, 21 nt, Homo sapiens
uguuauuagcagaaaugcuuu

SEQ ID NO: 2002 - RNA, 21 nt, Homo sapiens
uggagagcucuauuugcauuu

SEQ ID NO: 2003 - RNA, 21 nt, Homo sapiens
augcaaauagagcucuccauu

SEQ ID NO: 2004 - RNA, 21 nt, Homo sapiens
ggauauaucucuuuacaucuu

SEQ ID NO: 2005 - RNA, 21 nt, Homo sapiens
gauguaaagagauauauccuu

SEQ ID NO: 2006 - RNA, 21 nt, Homo sapiens
gcucuauuugcaugacuuauu

SEQ ID NO: 2007 - RNA, 21 nt, Homo sapiens
uaagucaugcaaauagagcuu

SEQ ID NO: 2008 - RNA, 21 nt, Homo sapiens
gggacaacagucuagaaauuu

SEQ ID NO: 2009 - RNA, 21 nt, Homo sapiens
auuucuagacuguugucccuu

SEQ ID NO: 2010 - RNA, 21 nt, Homo sapiens
acgaguuucguuugggucauu

SEQ ID NO: 2011 - RNA, 21 nt, Homo sapiens
ugacccaaacgaaacucguuu

SEQ ID NO: 2012 - RNA, 21 nt, Homo sapiens
ucuagaaaugcgcagacauuu

SEQ ID NO: 2013 - RNA, 21 nt, Homo sapiens
augucugcgcauuucuagauu

SEQ ID NO: 2014 - RNA, 21 nt, Homo sapiens
ucacgaguuucguuuggguuu

SEQ ID NO: 2015 - RNA, 21 nt, Homo sapiens
acccaaacgaaacucgugauu

SEQ ID NO: 2016 - RNA, 21 nt, Homo sapiens
cgaguuucguuugggucauuu

SEQ ID NO: 2017 - RNA, 21 nt, Homo sapiens
augacccaaacgaaacucguu

SEQ ID NO: 2018 - RNA, 21 nt, Homo sapiens
cuagaaaugcgcagacauguu

SEQ ID NO: 2019 - RNA, 21 nt, Homo sapiens
caugucugcgcauuucuaguu

SEQ ID NO: 2020 - DNA, 4001 bp, Homo sapiens
gacgtccagtctgggcacggagttgttgagatccggcaggaagtccctgctccagggccaaaggccccacccgggctcccccggatgtccccgcacccccctctattctcccaaaagaaagaagctgcttcccactttggaaacgtttattctgagcaccgggaaggggggcggcggcgggcgcctcactgggtgttgagcttcttagtgtactcctcgagagcgctcaggaagctgaccttgaagctctccagcacgggcagcaggccttggcggaggtcctcgagcgcgggcttggccttctcgctgagcgtgctcagatgctcggtggccttggcgtggtactcggccagtctggcgccgccgttctccttgagagcctcaaggcgcgcggccaagcgctggcgcagctcgtcgctgtagggggccagatgcgtgcgcagcgcgtccacatgggcgcgcgcgcggtcgcgcatctcctcgcccagtgggctcagcttctcttgcagctcgtgcagcttctggcgcgcgccctcttggagctctgcgcgcagcggctccaccttctggcggtagagctccatctcctcctgccacttcttctggaagtcgtccaggtagggctgcaccttggccttcacctcctccagatccttgctcatctcctgcctcaggccctctgtctccttttccaggttatcccagaactcctgggtcacagggccgagctgttcgcgcagcttgctgaaggtggaggtcacgctgtcccagttgtcaaggagctttaggctggagggtgagacagaagggttgagggctggcctcccagcgccccagcctatcaggggtgagccctgggtgacacctgtccgcggaggtgcagtggcctagcatttccagtacactctcaaccaacacccctgccccgccaggccatgccccgttgtgcagctggaccgaggcacagagaggagctaaaaaggagacagagctgggactagtgcccagttacgttggtctccaaagtgggcccttgaaggacctcgcttctatgcctccagcgcattctcctctccgaagacagcccacagtcttgctgggcaggagcagaggaggtggtgaagaagggaaaggggcttgctacacttgcaggcacaatgtggctctgtgatcacgcatcgggcagccctggtctgtcctttgcaggggacatgggctgtgaccctgcctggagatcccattccagtttctccatccagaccatctgtggggcccagctcatcagatattaggtgaggactcggccagtctggcttcaacatcatcccacaggcctctgccccctacccctgccctcaaccccaggctgggtccttactttagctgttttcccaaggcggagccttcaaactgggacacatagtctctgccgctgtctttgagcacatccacgtacacagtggccaggtccttcactcgatcccaggggctctgggggggttcatcttgctgccagaaatgccgagcctggctccctgagggtgggaggggagacccagatcaggccagctgtgggctgagatctgagccgaaaggccaagcttggaggtgggggagagggggccagtgagaaacctgctgcctctgcccaggagggtgggccacggggatttagggagaaagccccccgatggttggctccctaggttaggggacacctacccgtcaggaagagcacggccaaggtcagcaccgcagctttcatcctgaagggccgtgggggacctggaggagaagaagggcctggctgagtggggtgccttcagcatgcagaagccccgtgctcccccactcattgcagccaggtgaggagaagggcacagagcgggagaagacctcaggtacccagaggcccggcctggggcaaggcctgaaccttgagctggggagccagagtgaccggggcaggcagcaggacgcacctccttctcgcagtctctaagcagccagctcttgcagggcctatttatgtctgcagccagggtctgggctgggaggctgataagcccagccccggccctgttgctgctcactggtcctggcaatgtggaacttaagagttcaaggatcagctctgtccctggggctgggcaaatagagtgggcaaacagcaagctgcgggggctgcagggcaggggtcaagggttcagtgggggcgggaggggagtgtctgcaggcttgcaggtctcccgggtggggtcggggttccctgcactcatccccttcccctccatgggagtgtgtgggcagttgccattgtccattgtgttggcagaggaggggaggggagggacgctgggactcctccaccaaggagactgcctcccccaccaccagcattccagggagactacttcactcccctcccccttcccccgccctgtcctcccaccagtgctcttctttagtccccagcaggtcctccaggcctctctccaagcctcccaaactggtaaacctggggagaggggagagccctccgtggctcccagactgaggtttcggagacctcttgcatttcaaaacactccagagatcaattcggagctgccaacttttaattttgtcatgtaaagatattgtccgcctccaaaaaaccctcaccatctacagtgaccatcacttcaaaaaggaaaggctttaacaaaaaagggcataatctcagaattacattacagaattgaagccccttagattgaagacgtctccctttgcattgttcacacttatatttgatcacgcacaggtgtgactggatctcagcccttgggaagccctggtgtggggagaagacctctgggcaaaggaagtggcaggagacctgctttctcatttcacttggcctccatcttgctggaggaagatcgtgggcaagttatataatctctctgagcctcggttttctatctgcaaaatggggcaagaatggtcagggttgttggaggcccctgagacagcctgtgaatgtaaagtgctgtgtgtccgttggtgtttgcagcaccatcttgtcaggtttctcctggaaggcccagacctcccccagcaggttactgataggacctgagtcctagagcctgtgatgcaggctgagaggaactgtgacatcactccagcctctccccatgccaccatctcacagatgaagagactgaagagcacagagggactttgcccagaggctgtcatctctcagggagttagaagaaaggctggacctagaacccagtctctggacttgggatgcagggcagaaatgtaccctgtaccatcactccaggaaactccctaacactagaaaccaggctgacatctctgtttaccagatcagggagtggtcggcctcatgcctttcacttcagagaagattctggagccagaaaacctcaaatctaagggtcaggcaggttcaaatccagctgcctgaccctggatgagttatgatacatcacctccccacacatcagtttctgattgaagataatgatagaatatgccatcgccctgagttatggcaggggttactgtgtggcaagcagaataacgctccccaaagatgtccacagcctcatccctggaacctgtggctttgctaccttccatggcaaaaaaagattttgctagtgtgattaaggacctggagatggggtggttggcctggattctccaggtgggcccattgtcatcacaggggtccttaattatacaagagggaggcagtggcctcagagtcagagaaagagatgtgaggatggcagtggagatcagactcgtgactgctggaagggggccatgagctgagggacatgagcaacccttccctagaagctggagaaggcaaaggatttttccctgcagcctccaggagcacagctctgctgccaccatgattttagcccagtatgacccattttggacttctgtcctccataactgtaagataa

SEQ ID NO: 2021 - DNA, 4001 bp, Homo sapiens
ctttccagctgccctgtgcgccccccatccaactgccctgcctgccaaacccctgccaggctcacctctcctggatctgtcgcagccgatgctgctgtgccaccatctcccgcctctgccgctgcacgtggcctgtgagggcccataggatgtggctctgcttgtcagcgtgagcctgtgggggtcagaatggaaacctcagccgacagccacctcacctcccatcccctgaccctctgccccagcccctcattgtatctgtgtgacccagcaagtcaacaatgctctttggcctcagtttccccatctgtaaaatggggataaaataggactcacttcatggggaggtgatgaacatcctatggatttttttttttttttgagtctctctctgtcacccaggctgagtgcaatgacacgatctcagctcactgcaacctccacctcccaggttcaagcgattctcctacctaagcctcctgagtagctgggactacaggcatgtgccaccacgcccagctaattttttgtatttttagtagagacggggtttcaccatgttggccagggtggtctcgaactcctgaccttaagtgttccacccaccttagctacccaaagtgctgggattacaggcatgagccaccatgcccggccatcatatggattattaaagggcatagaacagtgctgggtacttactgggtgctcacaaaatgttaccagtttctctagtagtaagaatttattggccaggtgtagtggctcacacctgtaatcccagcactttgggaaaccgaggcaggcagatcccttgaggtcaggagttcgagaccagcctggccaacatggtgaaatcccatctctactaaaaaatacaaaaattagctggtgcacctgtaattccagctactcaggaggctgaggcaggagaatcacttgaacctaggaggtggaggttgcagtgagccaagatcacaccactgcactccagcctgggcaacagtgagactctgtctcaaaaaaaaaaaaaaaaagaatttattgagcaccaactgtgtgcccgccccatgctgaatattttacctgcattgagtacctggccctactgtgagatatcaggtgttgcccttatttgcaactgaggcacacaaaagggaaactgaggcacacaaaaggacttgagttttgtctggggacatgcagggtagaggccacagagctgggaggctgatctgggaggtctttgggactcaaggtgcagaagcgagttctggccggaaatcagggtctcagcccactagggttgggggagctccttacctttaagacctcaaattctcggtaggcagggcccagccaggcgctcctcagctggacttctagccgctgcacgctgtcccgtagcaccttctgtgcctgggccacctcccccagcacctcagctgtggcctctgcctgcagctgcagaatatcctcctccatctgcttaataaacagtgggtcactagtaggatgtccaactcatctttgtgtacctaaggacttgcctgagtttatcgctgaaaatcttgtatcccaggaatcccttcagtcctgggcaaaccaggatggttggttaccctagacacgaactcctctttggactcctggccaccccacagtgtcgcagctacggtgcccacctgagtctccaacaggcttgcccgaagttcctgggctgcatcccggccccggctgacctcctgccccaggagttctattgtgcggccatagagacccaggctgttcctggcctttgtcagccgtccctccgtggtcctgtacacaccgttgagggcctggcccagctgcagggtcccatggaagagcagggtcagctcctcatgctgtgccagttctgggccgcccatgggggccgctgaggcaggccgggtcaccattgccagggcccagagcaggcacagagcaggcactggcatgactgagggtctaaggtatagccacagcactgtcactgaagccttttatgcctcatacccccactgatccccagtcaatcgttaactggccgacctggtgccccgcattgcacaagggcctggcagtggtgcgatagttgcatcaggcgaatgtccggctaggccacgccgggatcacgcttcctggggctcagggccaggtgtgggtggggggcattgggagaggacgggccccagaccctgctgggagttcctgagactcaccatgctgagcctgtttctccatctatgaataggcatcgcaatgatgatggtaataacagtaaagattttataagcattgatggtttgccctgagctgtttgacctgccattacaatatctgctcttgttcccctcccacatacttgccacgtgggggcttttattggcctggttagtatccaagggggcaggtgcaggtggcagagactctcccaaggtcacacagcctgatctccaagacctgcatatgcccagatcaccactgactgccattttactccgtgggtgattgtgcaagtacctcagtttccctgcttgtaaaatggcggtgatgttagtcctgcctcatgagctacttgtgagaagtaaatgagttatttcatgttgagtgcttagaacagagcctggcacacagtaggcgcgattatttcattgttgtagtaatagtgtttggtgcaattattgtcattgttgttatttatcatcatcagtatcattacaaaggctcagctggaaggcctgaagtgcccattatacacatagggaaactgaggcccagagaggggtcaaggcttgcacagagttgcccctgggggaaggaggcaggactcggactctggcctcagtttccccacctgagaaacaggccacataactctagtgacctcctgggggaagggcagtcaggcccttgggtggggcttaggcttgaccactggccacctgaggtaccttggaactctggccctgagtgcctcgctattctctgccttctgtgtgtcactgtgccccatgagtgcctccaatgtccttctgtattcccaccctctaccacactgttcccaatctgtgtttttagggtgctcgcttgtcccccaccctctgccctctgtcctatctcctgactgatacctgtattacctctcaccgggccctcaatgccccagcctcatgacctactcttcctggactgtctgtgctcccagccagccttgtcccatcaccccagccttgtatgtgcaccttcagggcccctgtccctctgacacccccatcctgccccccacaggaacctgctgtacgtgtacccgcacagcctcaacttcagcagccgccagggctccgtgcgcaaccttgctgtgcgagtgcagtacatgacaggcgaggaccccagccaggctctgccggtcagtggctgtgccccagggaaggggggtagggcatcccccatgggtccctcatgaatccactctcccaggtcatctttggcaagtccagctgcagtgaatttacccgcgaggccttcacaccggtggtctaccataacaagtatgtagggggacacgtgaggaacttgggggcactcatgggggtaggaggatgtcccttatatatacacataaggcagcatcgatgggaagatgggggacaggaagaagagaggtagaggctcccagagtgctaatgagggaagctgaggcagacagcagagacagtggggcctagcagcaataagggcgtggcatggcagaggtgatggggcagacagtggggaccccagcccccagcagatcccccagcccgattctgccaggtcccccgagttctacgaggagttcaagctgcatcttccagcctgcgtgacagagaaccatcacctgctgttcaccttctaccatgtcagctgccagccccggccgggcactgccctggagacacccgtgggctttactgtgagccgtcccctccctccct

SEQ ID NO: 2022 - DNA, 4001 bp, Homo sapiens
ttcggatgggcaaagaacctattgctcccaacacgttttagtgggactcacagggaaacgaccttcctacccgatggggcctgggttacaagtagctgctctggtcaacagtttgaagagaaagtatctctgggcatagaaactctgaggaattaccgtatccccagccttccccattgctacttttttgacctcacgaagtataaacaaaacaaaaccccataagcttttaatttgccagcaaccagtaagatcaggtatcgtgaggtctgaaggccccgggttccagtgcgtgctcctttagtgatcaacccaccgagctgtttacgtttgacgtcttctgaggccaggcttcttgggcgtctgctccacagaaccggcatttggggaaccgtctgaaacattttcttctgttctgttggctcttttgttttgagtagaagaatctaagcgcaggggaaatttttaaaaagaacacacaatctttattagaaaaaacaatggctggcagaagttggccccatagtcaggggatgaaaaacccactacctccacccacaatcctggatccgtcatccccagtggcttttaagggcacaaaatgaggttgttttcaaaaaacagaaagtgcattctccgccccagagctctttccctagccaggaggcggaccgttgataaacatcccaactttgtcacatacctaggagttgctagtgagagggaccgcgatgtattaagttagggaaattatcggatcttaccatctccagtttctgacttaaaagtcacaaacagacaagcagtgggccaggtagcactgaacacctaagaccaataaagttagctctcccaaagctaaatcagaatacgccgaaaagcaagctaaggttaacaccctccagcaggcaaagcggggccccaaacacattctatggttgggaaagggtcattaccgtcggttgcaggtcgcttccttattcctgcgcattgctccgctaaccccgtctggctgtccgacggatcagtctttgggtccaccaaatgcgtgtcctcagagttagccggagccccaattaaaggcgccgccgggcggctcccgctgacatcctggctctcctgcgccggcaccttgcaggcacctttggggggccgcgggggtctgtagtagaactcgggcaagctgcccttctccacctcttgccactcgtacttgccctctaggggtttgtgattctgaaaatcgaaattccacttgcgctggctcgcctcttccatgtctctgcagtgcttctccaagtcccgggttaactcttcgtggtccaccgggccgaagaggttcctgcaggccgagggcttggggtgctccgcctgcctggcgtccatccgctccaggctagggctcccgttagacactcgcacgtttgacatctttctcccgggtctgcacgaccgcctctctcgcactctcaaaaaaacaaaaccgaacaaaacaaagcgcccctacgcagcccgaacccctctcggaagcccagcgactgccctcggagccaaaagacacagaccccgacgagccacggcccgagctctaggagcgcgcaggggctgcggggaagccccggcccggccgccgagtctccgctgatcaaatggactggcgagcgggagggcggagaggagaggggaccaggcaagcggagagggtggcaaagcccgtccgagtctgggcgggtgcaagcccgcgggtcccgcgaacccagccgctctccaaaccttgccggcgtcggagtcgcagagccgtgagcaagcggggacaggggagggggagaaaaacaccccgaaaagacgagccccctttttttagtggcccaatatggcggtggaagggaggctgacgaagaagaaaatgattgacacggcgagtctatttaaacagaggaggagatccattggttgcggcggcgggagccgccccgccgaggctggcgagcgcggccttaaggtggccccggcgcggttccgccacctcccctcgttcccgagcgcgccgcctccccgagcgccgccgggagattggctggtcgcgtgactgctggaggggtactgctgccaacaaacctgctctggctggcctcggagaaattaaaattaagacaaacaaactagccaaacggccgggaacctggggcggggcctgaggttcggggcccggcgctgcgttggcgggttcgccgcggcgcctaagccccgacctccctcccgctcctcgcccgggaagccgggacctggaccagaggaccgcgaaggtcgccggcagctcgctaggagccggggtggcgagctgcccccagctcggccctccccagcggcccccacctcgtggtctgcgggggaggccgcggagcgtttgctgggggggctgggcgcccccccgccggcgtgcctttgctgggggctggtggaggcagtgggcaatggttcgctcagccttaacccagaagtttctgccatccctggggaggctgggggcctagggaagaagccaaagcgaacgtctttcttttagaaattagccaggagtagacgcggcacttatcatgaactcaagctctccctcaatgaaaataagaaaggaactcaagattaaaaaaaaaaaacaaaaaactctagtctctcaagtcccttaataaactttgtagctgtctcagacacgtttagttttgaaaaacgagggtacacccctggcccaggatcttccttcccaagcacagttaaggccatggacattggctgcgtgtgggaactcgtccctttctacttttctgttctttcccgggattgtagcagtttcctctacctgagtccagccgccaaatacaacagctccttccttcctccacccttctctctcaccagatttcactgctccaacaaactcagaacaatattcagatgctagtgaatgctttcagagggctgaagggtgaaaatactcccctcggggtcaaactccagatgatgaaatgatttttaaaacaccacaaccatgtcctaacgtccgatactagtattccagcgtttctcttctcccttttgcagctggaaatttctctctcagtgtgggcttgagcaccgtggtggaaggtaaagtaggacgatgagcagggctgccctgagacaaagctcagtggatcttcaactgcctccccacccccatgcccggtacccatcatcttggtttgagccaaagttaatgcattttactggaaaccaaccttccgttctaatattacacagcagcaaagttttcttaagcacctatgctacagatgagcttgatgtgtagcttgttttcttagccacatcttgtccactttgtgtgcctacctcatctcatacgctccagaatgtgacagctggaagggaccctcgggaccctgtggtttaaccctctcctttttaccacggaggaaatcgagactcagagaggtttcctgtccagggacatgcattcggttggtaccggagtcaggactagatgcaagtctcctaacactcaggttggttcattttctgttcctttccttcctaatggttctcactggttcagggttttgtctgagtttgattgtgctgtagtctgcaggtcctgctgtcttacaagtgactgaaaatggctccttcccaggccctgggttgcctgcagatgtttccttgatgtggcctgtggtcactgatatttaaatgcagctgtcttgagcctgtggtatcaccatccactagttcaactaaaattgaaggacaggggttgatacccagagaacagtaaagggggcagtgcccagaactagttttcaagtcaggacttcctacctaactgacagaaaagaattcacctaggatcaagcaagaggtctcatcctctttagtttttctacttttaaggctgtcaatttattggactgcagactgggggaaaaggaacaggaaaattagggtag

SEQ ID NO: 2023 - DNA, 4001 bp, Homo sapiens
tattcaaccacggtaatgtatgcttcaaggttaaaaagtagtcatccaaatccttgactatttttcaaaacagaagttagcaattattttggagaaatcctagtgtaattagcccaccacttgctaattaatttactgatatttaaatacatgttgtttttaactcaccctttctaagaggaatacgtaattgaaaaccatggactaacattcagaaaaaaagttacataacagccaatagtgttccttaaccagactgactgggatattacaattactacagaaaaggcacagcacatacgagtagcactgtgtacactgaaaggtcatattagatgtacatatatgatagtctattaacttggatgatttagctcctcaggctatggaggagactgggtagagagccgaaagattctgtattacatagacagttaataatcaggcttttcacacttaggaaaatctatttctatattatttaacatctgttttaaacaatcacttgttaaatgtttgaatgttttatttgcttgttaccctagtggtgataaagattatttcaatatgttcagtctgattacagtcactgacagatccccatgacagcatgtgaagataggttatagaaacgatgcatagtttatacaaaaagcataaattgctcccctttctccaaaaactttatttttggagccaaatactgtccatgctcatgctccatttgcttaaaagtacttataattataatccactgattgtaggggaaagaaatattgcaaaacagagaaagggttctaaaaatcgtacgcaggcaagaaagaatgtaagacaaaactcattaaagggcaaaataaataaataaataaataaataaataaataaatgctcacattttcaataatttatcacttctgtcatttttcattaacagccttcaaagccctatctgaaacaagctgatacagagaaattaagagcagtaatcaagcgagaaatcatagaccagctgggtcgacatcaacttggcaaaacgtgaatacagttcaatagctgaaacagatgctagagttgttgaaaaaccctgcaggagatattgatatattttcttcatataatgcagaatgactgaataaatgtcaaaagctagaaattgatgaggagaaatgactgacagccaaactccttataaaatagaaaccaagtataacaattttcaacctatccaaacattctgtacattctcatttctctcactgtctgaatatgccaatacatcaatcagttcttgcaactaaattgcatataactaatctggggtagatttccccgaagatttttttccccctgtcatcatctacctgaagaaacctagactcctgaacaatactttattctaaaatcttctaacactgatttctatcccagaagtgttttcctgaggttggaggcaagcacaccccctccccaaaatctaacgcagcacaaggcaattttaaaatccattctgtaaaagcaacactgtttgcagagtttgaagagctcggcaacaaaccccagctaccaacagctgcttgttcaaacatatgctttgtcatggccagcttctaattgtatttgtaatgatgtaatagctttaataatcctaccttccatgccagctgtttttcctgtcactccatcatgccaataagttggctgctgtaacaaatcaagatagtgcaaaacagcatctttctcctgattctgtcatcttcctgaaagcattctattactgccgactgctgggaaccagaaagtctatttgaattccaacagctcccctttcgcatgattcaagttaggttaggtgggcatgcctaacatgattctttcagtcatttattatgcagctgctacaacgtcggtgtggtaaccactctgactatctgatacgtcagtcgaacaaaacctatacctcggagcaaacacatgagccagagcagcgtttgcatttaacgagcattcttcctgcctaaaaaacagtggatctgcaaatctctttcagtatctactcgctcttctgtacagatgcaaagcctttggattagattattttcctaagtgtaacaatagtagagttcctcgccaaacatcatattattcacactgaaattttggctgatttttacttatcttcacagccttttaagggtaaaaactctcttctgaattgtacttttgcaataagatgttgtgtgctcagctccacatttctgcgttgtaaaatatagcatgcactttctcaaatggaatttgcctcttgtgactctatagcaaattttcaaataagaggatatttcaagaaaatattatttattttgcacactggagatatttaaagtctggcaccctgtatgcttctcccaagggtagactttatacttgatattttgactttagatgagtgatttcttcacaaagtaagaaattagattagctgaatctcttacacaacttctttaacaagtaaataaatgctattcaggaaaatgcattttgtattttaaaaatactaatcgtgaatcagtatttgttaaaagaaactgtaattgttatcaattataccgtataattttctctaaaacttccaagtttgcctgtcttgggggcacttatggtttgaaattataacacaagaaagtttaagtgttttcatgagaaaaattaataaaatcatatgtttcctctcagatttgtattaggtatttagtttgttaggaaagctatcccccctaccacaaaaagtaaacagacagctggtttcatagttacattatgaaactataaggaataactcatttagcatatgtgaaatatgccaatatcgctattctgaaatagtgttttcctaaggggttatggtgtgtgtgtgtgtgtgtgtgtgtgtgtgtgctttgtgtgcaagtactcatacattttagctattctacttccatttgatttttgtataacaaacacaaataatccctatatatcaagatatacacaacaatcagtaacttatagtttattagatataatttataaatgcaagaaataaacctgaaagataagttgagtccatatgaatccaccaagatttctctaaaataatatacatatcattccacacaactctgaaaatactggtatatcaattactgctattttacataaaaagtcttcggtgattagcatatctattttagagattgagaatagcataaatgccatgtgttttttttgttgtattcttggcttctactagcctctccagcttaaactcttgcctctcttcctctttatactttattccagccacaatggacttctattttttcttctaaaatgctggactccttcctgtttcagatattttccgtattctgtttcatctattcataagtctgtcttgaggcttgtgaaaattaattttttgtaaaaatgtatacaagttgtacaacatgtttcaatatacatatagtgaaatgattactacagtaaaagtaattaacatatccatcctcttacatggttaccctttttttgtgtatttggtgataacactcaagattactctcttagtgcatactgtagtgttattaactatagcccctatcctgcacattagatctctagaacttattcatcctgataatgaaaactctgtgtcctttgaccaatatcttcccattctccccctccctctgcccttggtaacaatcaatctaccctctgcttctttatagctgactgttcagattttacatgtaagtgagatcatgcagtattattcttcctatgcctggcttatttcacttagcgtaatgttcttcaggttcacccacattatcacaaatagcaggatttccttcctttgtaggctaaatattatttcattatatttacatatatcacaatttctttattaatttatctgttgatgtacactcaggttgttttcatgccttggctattgt

SEQ ID NO: 2024 - DNA, 4001 bp, Homo sapiens
tatcaaactacggcaaatttacaaactggattcaaatgtcaaacatccaagtagcagtatgttgtcaaacagcaaaatttaatgtataatatagccctgagtatatctccgttttttcttaccaaactcattgtcatgttgcataggcattacttgatgattttttaaatgcagcgtgaaaaaatcctacagggcatgtcccaaaaagattacctttcttcgcattctaagaattgaaagttatttgaatatctatgacaaagcagagtgtagatttaccttgcttaatttcagcagaattgcatatattctttcaaaattgctctatatacttgtatatgatgttaattatgtagaatatatatatatataaaatcactagtgattttgatggtatttatgttacatatatcaaagaaataaaaacaaaaaataaaaatgtgtgtgtatattgcaaacaacagatatatgccatgcatatatttgtaatgatagtaaatataatagtttttcaatctaaaagtaataatgatgtccaccaaaagaaatttatgaagcaagccaacaatgtaagtaaatattgtattataaagtctggtagcttttaatgtgactcaatacatggacaatgttaacttatttccacaaagttttcccagtggcaaaacttctgcctttttttttagtagttgtggagcattacttatttggagagatttattttttcattcttaattataggcattgccctcatatctattttagaataactacactccacaagtcaaagatgggtggggaagagataaactcccatctcttcgggacacacagtccttatcatatattatttttactgttgtgccacagtccatttttaaatccttcattagtcatcatgactttcttaaaaataaacgaaatagttgtatttctatatgaaagacaaactaaaaaattgaactgaaaagctggctcataatagacatgaaacaacaaggtgactttactactaaatataattaggagttcctcaagtttgtatgtcgtttacccaagaaatcatctgatcatttgatagcatagatcacatcattatttgaaataattatcatgatatgctacagaaaagagcatttgaaatagtaaatgtgagtaagaaacattaaaattaaatctttatcaatacttttcacatccttcaattatccgtcccaactcattttattctttattttatccatgatgtgtcagagaaactttttctaacttttaggcctccatgtagttcctatacagtagttagttcaattgagaatatatgtcaggtcagtaacctttatgtaactgttactaaatacggaagtatcaactaatcaaaataataactcagatatacaaactatctcacagcaatcaaaataaatctgttatagtcaaatgacattctgcatattctattactgcagtggtttgttaatcaagaaatcatgtgtttagttctatcgcaaagaaaaacttttacactccatttctgttgaaaagttttcccaatgaaaaatatatattcctgaataaatacatatatatatgcagtatatataacatttatgcttctttgcaaactactgtgataatttaaaatcaatctacctaattagtgagcttgtcacaaactaaacgttatgccacagtaaaatatatttttagttactttgtacttacaacagtcctctacttcttcccaccaaagcattttgaaaagtgtatatcaaggcagcgataaaaaaaacctggtaaaagttcttcaaactttattgctccagtaggcttaaaaacaatgagaaaccaacaaacttcagcagctttaaaaaaagtaacacttcagtttttcctattcgtttttctccgaaggtaattgcctcccagatctgagtcctgtagggggaaagtgagtgatcccaacactgagtgagtcaacacagtaactgatgccaggattctgtagaggcccccggatatttcaaattccaggacctgcgcacaagcaagtgacccgccttctctctcaagttggtttcccataataggactgtccatggtcactacatataaggttgtgcttccagcatggcaagctctgtgaattcaaacaatgctcaactgtgttctgattaatatccaaaccagaatagcacagtggacatagtacttgcttttaaagccttctaaacacaaaaactattcagtacaaaagcataacaatactttctgtaactttcatgtgaatttattaacagagcagaaaatccggattcaaaattgacttttaaatgccttttttatcctctcaacaacaccaaaaatttcactctaccaaataaaaaggaatgcccagaataatccatgcatttgttatgtatccactgtctaccaaagttattttttccccttgggattcaatcaaaagttatgtattgatgatgccaacagtctgaataagagaagcagcagcagaatgcagcagctgaattctgaaggcagaatgtgtgtgtgtataggtctcatgggacatgttttcctgctaaaataaagaatactcttataatgcaggaaagaaatttttctcaaatcctaaatttcagttgtgaattatgctaaaacttctttactaacaaattattctttcttccatttctctggtgccaattcttaaaacaccatttttttagacattgagttaatgatcatttaatggttctgaatagaggcttgttttctgtattaagtgaatacagttgtattatgtcattcagcatgtaaatcattctttgccaatagaaagcttcttcatcttgttccttattacttttatgcaacaggcgagcccaaaattgatagaaaacattggaaacattttttaaagaaagatattctttttatagttataataatccctactaaaatttttgtttgagtgtttttattgtaccatttgttaaagtgacagactcatttttctatgtcaaacattcaactgcttgcgactgcaatgagtaatagataaaaattaaaaaaatattgagtcagactgtgatgtttaccttaatagttaattgtacattttgtgttttagaatattattgtcataacattgctattttccccagcaaaaggtgtatgagataaaacataaggcctaattttaatttaaaacattcttttccctaggtcacctcctttcctctcagtgtggttgtctaaatatgcatataagcaaaattttcataaaacaacatagaaaaaatgaaaaaattgttttggggctgatttggctctaagtctgcatgttagcatcagtgtccctctatgctgtgaggtacaatattgcccagagtataagtgccctttgtatcttgcactgtgagttttctacaaacataaacccttgtttaggccaaggcgtgaatacaacttgtcggtcccaaaccaacatcaatatcacgtgggaacttctgagaaatgcaagttgacacgagacctcaaaagtcagaaattctggggttgggacacagcactctgtgttttaccggtgattctaatgcatggtcaactttgagaaaccctaaagtgtatgtttctaaaaacaaccgtggttctaaatgtaacaaagatgtgtcctgggtaatgtctaaagcaccaaatcctgatagatctgaatgccctgagatacatttaattgccattcagccttagttgataatcagaatttatttggcacctataatgatttctgcattgtgtggaatgcatatacttcccttaagattttataatccaggtgcaaatatatgcttacaataactggaaaagtgaaaggcacgtaaaataaaatttagaccgaacaaattgaactccagttcagactgtgtcaccacagtactttcttgtgtcccttaatcacttatctttctcctttagtcctcagaataactacatct

SEQ ID NO: 2025 - DNA, 4001 bp, Homo sapiens
cacttcagaaggactgaatcagaaactctgggggtggcatccagcaagctgtggtttaaccagccctccaggtgaatctgatgcccactcaaggaagagtgagaaccactgttctaatctatcgtcttccaagagtgtgtgggaagatcaaagaaaaatcaggtcatggggctttgcggagaacaatcaaacaaatacataaatcaaggactctataagcataatttaataaatagacggatgattgtttttaacttatttttcaatttcctccttagtttgtacatgcatttagagataatctcagcaatgtcagcgagcttggtggcatagttcaagctgtgaaggttcaataaataggtcggtaaacattgcaaatcaacacagcttttgatgaaatgtcaggcaagacagggcttagctatattcggctcagcttgaactcataaaccatcaactggcctctgtacttccaggacaatctgatgaataaaatacagatataaaattaaaaaatatatttataaagagattagtaaaacagcaatctgtaagtgagaaatgacaaccacttagtccagaccaaatgagagagaagacttgcaaaagggtaacttttcttacaaatcaagttatgggaaaatttgagatccaaatagacttttaactttggattgtctttattcccaacacacgtttttaatttaatgcggtgtactttatcctaactcttttagctcacccccctgaaaaaaaaactagctgtcttcctaaagatagagaaaacttgtccaagtcagaaactctttggaattttaataaaagtaacataatttagaaattaatatacttcaaatatactgacagtatatattggcaacagaatatatgctaatttagaattttaggatattctataattaaaaaaaaacctgataaatcactacaccttttcactttatttagaagctaccatttaataataagtgtttaacctctaaaatcattctgagatatttcagataattaggcagcctggaattactgtttacaattgtcccagtttgcttcctaataagttgtgcttgtctaaacatgtctaaattactattcacaaggatccttgttatttccgtcttctttgattaaaaacttcttaaaaatgtgagtgtatatgtgtatgtatatatatacacatacacatattcatatgtacatatatgcataaataagcccatatatatatgtgaaacacaggtttttctattgttaatataaaaatccctcattagttttctaatgagtttatgaatgtagtctacgtccttagaaatttaatttgaggtaaaaatattatcgtttatagattaaggtctggatatttttttcttttcttcatactagaaataattttagatacctgaagacaaagttcattaaagccacaacccaaaaagtagaatatgggttccttcttatttcagtgatttgcattatcctataggttattggtgtcaaacccctttcttcccttcctcacaacaaaagccccaatttaacttttatagaaaggcatatggaacaggagtcatccaaatatatcccaggggttgcaaattgaccaaaagagtcacctttagggaagcctgcttctgaatgcttgtggaatttatcattcttctgaatggctgttgcatttatctgcagcttttactcaccagatgagacctcagacatttcaaattctgcggaggctggctacacaccttcataggaaagctttttgctgatttccctgttggtacttttctcttacacattctatggggtatggtaaacctggaggtagagtcatagccaagcacagataaagcaggcacagaatctctgaccagcctcacaaaagcagacaaacacacaatctttttgcacctgtttcttccactccggttgccgtgaatagtgaggtgttctcacagattcagcttcacagacagcattttgcaaacactcccctctcacagcaatggtttcttccctcaccggctcaatctacctgattacgttcccttctaatcagtaacctcagttcctctagaaataactgtgtcgtctgctttatataggatttatctgagtctgaagcagaaactggaaagtagacttagaggagctgattattatgaagacacctgtatttttgtctggtattcacgtgaactcgacagtgcactcatttatgcaaactggtgttagtgaaaaagaaaaagaagcagagaaggaagcaaaaagaagagactggacctataaagttgcgcacctgtgtgatgctaggagaagaaaataactctaaaaacgtccagtgctgctgaaaacacatttgaacttcctatgaaaaccaacagtgcttgacatacaaatatcttcctccagacacacctttaaaaatacattttaaaatctgaaacaatcttaaactcaatctaaaccacaatgcagaagttaattcttaaggcaaatggagattaagaacgaaacttcatccacataaaccctgtgttttaaaaaaagaattaaaaggaataatccgtataacttactcaaatttgtatttgaagttaaaccttgaatcctgcttcttgaaaaaacagaattgtgtcaggcttctgtaatgactgtttacccagagcataagattgaagtggattttcagattaaaaataaaactcttaagtatgtcaatccccatctgatcaaagcatataaactaaatttttccaaggacttcattaacaatataaccaagtagagctgcagttcttggttttctttagagtaagttgttaaaatgattgaagttcatgtaaaagaaatccagagttacagttaaggtttgctttttttttttttttttttttttttttttttagtagatccagtgcccggcaaacagtatgtgctcaacatatgtttatttaatgcgaccaaaagcatacaatataaagtgtcattatcattgccactgatatttttaaaaagccatgttctatacttatttcatttttacgtaagccacaattttacaaggtttcaaacaaaaaaaaaaacccacaccttgttttctttaatataaaatatttggcaattataagcatggaccgtgctggcagtaagttaaaatgtgactgattttttttttctccgttccctactctcaattttcagatgcggaaatttcatttggagagaacaggaggtgttggtgggaaaaatctcattaatcgtaccgtattcccttgtctacaaagagtactgcatccaaattacagaagaactaaagaaaccttgtagcatgagtataattagcagtgctactaagtgaatggaaatggaggttgcctaacttaattaactgtaatcattactcattgtcgtactgcttagaaagattagttgagggtatttcttctgtggtattactttaggcgtttctccttccctcttaaatgtgaaacaattacactataaagaaagaattagcatgccctttcaatcagatagaagcttttccgaacaagtaagttccatgtcctagctcgagggcggcaaaacaggaatgatgggaaaatatttagttgggccaaagttagagaaattaagaaaaaagtagttaattgcagaagttactgacttgaggaggaaaaaaggaaccctatatatgagtttctgtaaagaaattagctcttggccagggaagaaataaataacaaattaagatctaaagggaaaaattaaggataacacagtacaaatacgcagtactgtctgatgaagttgttcacaattgcacaacagtgcaagattccacaatgcaccttcaaggacactgtagctaaggattgctttctgatcatttatccttttagcggaagacacttggcatctgggaacatttgttcttttgaataaaaatcacctcatacctaaaaggaacctttata

SEQ ID NO: 2026 - DNA, 4001 bp, Homo sapiens
ccacttcagaaggactgaatcagaaactctgggggtggcatccagcaagctgtggtttaaccagccctccaggtgaatctgatgcccactcaaggaagagtgagaaccactgttctaatctatcgtcttccaagagtgtgtgggaagatcaaagaaaaatcaggtcatggggctttgcggagaacaatcaaacaaatacataaatcaaggactctataagcataatttaataaatagacggatgattgtttttaacttatttttcaatttcctccttagtttgtacatgcatttagagataatctcagcaatgtcagcgagcttggtggcatagttcaagctgtgaaggttcaataaataggtcggtaaacattgcaaatcaacacagcttttgatgaaatgtcaggcaagacagggcttagctatattcggctcagcttgaactcataaaccatcaactggcctctgtacttccaggacaatctgatgaataaaatacagatataaaattaaaaaatatatttataaagagattagtaaaacagcaatctgtaagtgagaaatgacaaccacttagtccagaccaaatgagagagaagacttgcaaaagggtaacttttcttacaaatcaagttatgggaaaatttgagatccaaatagacttttaactttggattgtctttattcccaacacacgtttttaatttaatgcggtgtactttatcctaactcttttagctcacccccctgaaaaaaaaactagctgtcttcctaaagatagagaaaacttgtccaagtcagaaactctttggaattttaataaaagtaacataatttagaaattaatatacttcaaatatactgacagtatatattggcaacagaatatatgctaatttagaattttaggatattctataattaaaaaaaaacctgataaatcactacaccttttcactttatttagaagctaccatttaataataagtgtttaacctctaaaatcattctgagatatttcagataattaggcagcctggaattactgtttacaattgtcccagtttgcttcctaataagttgtgcttgtctaaacatgtctaaattactattcacaaggatccttgttatttccgtcttctttgattaaaaacttcttaaaaatgtgagtgtatatgtgtatgtatatatatacacatacacatattcatatgtacatatatgcataaataagcccatatatatatgtgaaacacaggtttttctattgttaatataaaaatccctcattagttttctaatgagtttatgaatgtagtctacgtccttagaaatttaatttgaggtaaaaatattatcgtttatagattaaggtctggatatttttttcttttcttcatactagaaataattttagatacctgaagacaaagttcattaaagccacaacccaaaaagtagaatatgggttccttcttatttcagtgatttgcattatcctataggttattggtgtcaaacccctttcttcccttcctcacaacaaaagccccaatttaacttttatagaaaggcatatggaacaggagtcatccaaatatatcccaggggttgcaaattgaccaaaagagtcacctttagggaagcctgcttctgaatgcttgtggaatttatcattcttctgaatggctgttgcatttatctgcagcttttactcaccagatgagacctcagacatttcaaattctgcggaggctggctacacaccttcataggaaagctttttgctgatttccctgttggtacttttctcttacacattctatggggtatggtaaacctggaggtagagtcatagccaagcacagataaagcaggcacagaatctctgaccagcctcacaaaagcagacaaacacacaatctttttgcacctgtttcttccactccggttgccgtgaatagtgaggtgttctcacagattcagcttcacagacagcattttgcaaacactcccctctcacagcaatggtttcttccctcaccggctcaatctacctgattacgttcccttctaatcagtaacctcagttcctctagaaataactgtgtcgtctgctttatataggatttatctgagtctgaagcagaaactggaaagtagacttagaggagctgattattatgaagacacctgtatttttgtctggtattcacgtgaactcgacagtgcactcatttatgcaaactggtgttagtgaaaaagaaaaagaagcagagaaggaagcaaaaagaagagactggacctataaagttgcgcacctgtgtgatgctaggagaagaaaataactctaaaaacgtccagtgctgctgaaaacacatttgaacttcctatgaaaaccaacagtgcttgacatacaaatatcttcctccagacacacctttaaaaatacattttaaaatctgaaacaatcttaaactcaatctaaaccacaatgcagaagttaattcttaaggcaaatggagattaagaacgaaacttcatccacataaaccctgtgttttaaaaaaagaattaaaaggaataatccgtataacttactcaaatttgtatttgaagttaaaccttgaatcctgcttcttgaaaaaacagaattgtgtcaggcttctgtaatgactgtttacccagagcataagattgaagtggattttcagattaaaaataaaactcttaagtatgtcaatccccatctgatcaaagcatataaactaaatttttccaaggacttcattaacaatataaccaagtagagctgcagttcttggttttctttagagtaagttgttaaaatgattgaagttcatgtaaaagaaatccagagttacagttaaggtttgctttttttttttttttttttttttttttttttagtagatccagtgcccggcaaacagtatgtgctcaacatatgtttatttaatgcgaccaaaagcatacaatataaagtgtcattatcattgccactgatatttttaaaaagccatgttctatacttatttcatttttacgtaagccacaattttacaaggtttcaaacaaaaaaaaaaacccacaccttgttttctttaatataaaatatttggcaattataagcatggaccgtgctggcagtaagttaaaatgtgactgattttttttttctccgttccctactctcaattttcagatgcggaaatttcatttggagagaacaggaggtgttggtgggaaaaatctcattaatcgtaccgtattcccttgtctacaaagagtactgcatccaaattacagaagaactaaagaaaccttgtagcatgagtataattagcagtgctactaagtgaatggaaatggaggttgcctaacttaattaactgtaatcattactcattgtcgtactgcttagaaagattagttgagggtatttcttctgtggtattactttaggcgtttctccttccctcttaaatgtgaaacaattacactataaagaaagaattagcatgccctttcaatcagatagaagcttttccgaacaagtaagttccatgtcctagctcgagggcggcaaaacaggaatgatgggaaaatatttagttgggccaaagttagagaaattaagaaaaaagtagttaattgcagaagttactgacttgaggaggaaaaaaggaaccctatatatgagtttctgtaaagaaattagctcttggccagggaagaaataaataacaaattaagatctaaagggaaaaattaaggataacacagtacaaatacgcagtactgtctgatgaagttgttcacaattgcacaacagtgcaagattccacaatgcaccttcaaggacactgtagctaaggattgctttctgatcatttatccttttagcggaagacacttggcatctgggaacatttgttcttttgaataaaaatcacctcatacctaaaaggaacctttat

SEQ ID NO: 2027 - DNA, 4001 bp, Homo sapiens
gaggattttatcatcaggattctccccaaaattctctttcttcatccactattgcaattgtatgcactccataaggaaataatattccctggactttttaagcctatcaaaactacctatactctgccacatattatcagggacattcttggtcaaagttagacaatatggtaaattaactcatgctattgtgtatactgttgcccagaacacctattaacggtgattcattaactgtaattgcattgtaaccatgatctacaaatctaatatatcacccccaaattcattttaaagtgaaaaacttcagacatcttcaccaactggcagggagaaggctttgagatttgcagctaaccttctagtgctcctctcatcatagcatggacttggtgattgggttcacaacatgtatataagatttgaaaagcagatctagtaattgcgatcacacaaccctaaagacttttgaataaataatacctatgataacttcacatatgtttaaatgttaattaaaaaatgagaacagcattttaaaaatacttcttacagtgaatgtaaatttagttatggcctaaaatttactcatttaaaagtcaactcagatttattttcaacactattttaattctcattctagaaaaacaggtaaacacgttttatattttcgtttgaatgaagcatgggagtgagtgcatgtagctatattgagcatgatcattaataattgaggtgtaaatttatatcgataattttgtgttactcactgcttgtaactaacacatttttataaaacaatatagaccatgtgactaaacgaggagtttataataaaatgtttgagactgctttccaacaatgccatagaaaatattttctttttttctttttataagatagagtctcgctctgttccaggctggagtacagtggtgcaatctcggctcactgcaacctccgcctcccgtgttcaagtgattctcctgcctcagcctcccgagtagctgggattacaggcgcgtgccaacaaacctggctaatttttgtatttttagtagagacagggtttcaccatgttggccaggctggtcttgaactcctgacattgtgattcgtgggcctcagcatcccaaagggctgggattacaggtgtgagccaccacacccggccaaaaaacattttctttaccatttactatcctatggttttactctagcttttagtatagtttgaagtcagaaacaccagaacgtattgctcctgtctttgaaatgtctttatttcaaattcctccattacatccttaaaaaaataaatcttagactaatgatctagacccccttttcttcctacctacctccaaatagtcaaatcagtgaatcaaaacaaccccatggaaaactagttgaataaatttaaagttagaaacactgcaacattttgttgaagtaataaaaacaaaagaatggaagctgattcccagatgtacttgcctgggcttcctgaggcatttgagctgcgtccaccttgtctgcaatataagctgccaactgcttgtcaatgaatgtgagggactcctggattaagtgtaaggatttttcagtctcctgggcagactggatgctctgttcaagcaacttttgcctccttacagcctaaaaagaaggaataagagtgtatcagttaaatgtttactcttgatagcttttctgtaatcctgctgaacaataaatgaagattctagactcttccacaatcacctttttgtaagacagatttcgcagcttcctggcactcattcagctctgttgatagaaaaaaaatgtgaaggagaaaaataaatagcaaacaaaactataggatcagggatctctgcatgaaaatcaatcacaatatcacgtacattaaggaaataggctggaaaaaaaattagcaaaatcatctcagtcattgcaatctgtctttctcaggtcgaatgttcctcctgatctcattatatagttcaagagatttggtttgcttagaatagggtcatcgtcatcacaatccaattcaagacagataatctgcttccaccagtgagatacatgtacaatctgttcagaatcagctccttgtcaaaaacagaattttagataacagtctggttaaagatttattttgaatactatttcaaccagctttgcatgatcttttttctccctactttctttcacaatttggattacagaaattgtttgtacaattgggtttatgttactgctgaagtagaaaaaataataagtaatcctaatatagctgcaattaatcttgattgtaactataagtatgattaggataattcaataatgttcaagtataaataccatgctgcacagattggaaagtctcccttcaaggatctgttcacttttaacagagtagttgtaaaagtaagaaatagggcaggcaacttattgggaattcattatgtgtcatttaaaatacatttccttaatatacaatgtaaaggcatgattatcaggtacaatataactttctttcccacagagcatgactgaggttttaagatgatcttggtttttatattatatatagaatattagatattacataaatactatactttttaagctttaaaaatattagtgatgtcattattcttcagtgaagccagcctataacacagctttgcccaagtaaaactacagttaaaggcatctagactaaggcaaaagaacaggaagtttagtgatgctgcaggaagagggaaggctttcccagtacttctccctgtaccataaattttgactccattaagattttatcctgggctttcctttcttctcattctacccataccttaacttcaattcctcctcacattctgacaactctcaactctacatctctcaagtccagatctccccttgatctccatacttgcatgttatctcaccctattggacatctcctcatgaatattctgcaaccaccaaaagctaacactcccacacatgaactccttgcatatactcttctcacctacttctcaactccccaacttgcttttcctccttctctgtattttttccggtttcagcgaaaaacaaataatgattccctttattagatgtaattctagatatttctacttcctctatcatgtccttcatcatgttgcatctaatcagtcaatcactaattatttattataccttctaaatagttcttgattccaatcttttctctctctctccattgtctttactctagttaaaatcattactatatcttacctcaaatatgctatcagtttcttcactggcattttactctgccacatcccacctgtaaagcagctgcaatgtgttctctcaataacgaattggggcttcctgtctaaaattctctagtgattctttactgtccttcaaataaaagctctattcttttttttttttttttttttttgagatggaggcggagtctctctctgtcacccagactggagtgcagtggcacaatctctgctcactgcaacctctgcctccctggttcaagtgattctcctgcctcagcctctcaagtagctgggattacaggtacctgccaccatgcctggcgaatttttgtatttttagtagagacagggtttcaccaatttgcccaggctggtctcaaactcctgacctaagatgatccacccacctcggcctccctaagtgctgggattataggcgtgagacattgcgcgcagccaaaagctttatccttaatgtggcttaaaagtcccttcataatataagtcctgctggtgtcttttactccctgctctagctatacagaaattttattttttatttcccaacctacactgtggccctcttgattcttggccttaaacatgttgttcccttttactggcataatctcaattctgacttccttttattggctaatttacatttatcttcttaatgtagtggacatctct

SEQ ID NO: 2028 - DNA, 4001 bp, Homo sapiens
ttgatcatacaaaataaaaagaggagctctaaagaaataaagcaaaaaaaaaaatttataatccacattactgcaatcatctagtttgtgaaagaagagtatgtattttaaattaaatccttaatgatttgatattttgtttttggaacttcacaaccaagactatcctaaggaattcagagctttcctcacaagaccaaagcaacagtgcatgaaattgaactcaaaaagagccaccattctgtgtgacttcttggctgacacaatttagatatttatagctttacgaatgggccactggagaagaacttgaagctttctctagccaggaaggattaatgaacgtgcgcacctggtaattacaccactccatcttcctgaaagccctcacgctgcctccatggcagaaactataatgaaaatgcattgaaaaatatcaatctgcaattctacaattaaatctaaataataaaacttggtatcttttctccccacacattccagatgtgataaaacacagacagcatttaaatttaaaacatagaagctgaatgtcagcctatttttgaacatgcctcatttccaaagtaaacctcacaagagaaaaaagaggttattaaatacagcaaaaaataacaacattcaaatgtgcaacagagaacccataactgttttccctttattaaaacacagcatacaccataagtgatgcatttacttcaaagcagaggcatttcaatgattaaatcacaaccgaagtgtacaaaggtaaaatttagaagtgcaaaggtatctttatcttccaagtccagttacttgttctggctattttttctaaactcttactgaaaggaaaacctcacttaataacttttaaaaatataaataaaaaataaatcattatcttctttacataaccgtatgttaattgcaaaattacttgaactaaagagatatacgatgacatagtatgcaactcaaataacttgttacaaagaaattttcatcctaaaacttgaacaaatcaaactttttgcagtagtatttttctcagataaaacacagtatagaggttcaacctagtgtttcttaatgtgacacaaagcaatttgatattccaaggaaggcagctatgtatatataaactgagaaggctgctttcagaaaacaatcaaggttctctaagcaaagcagggttttatgataaagtttcatggtactcacactgaattttaatgactgctttagtaaagcagaaagagagaaaatttaatgtaagcactgatactaaaagttaattgccgtcttaacacacaggcgccaagattcccctagcaggagtctcttaaaaaacacctttaaacgcagaagagggcacaagctttgaaaaaaaaaaaaaattgcctgttactgttaaactctattgttccctgatggagtatagaagaaagaaatgctccaggagagggaagtggatatgaattgccccctccagaggagccaaacaaattggctgtaggaagacttcaaaagctggacgaacagagaagctcaaagaccttacagatttgggctacttgcccttgctgtgttttttttttttttttaatttcccctagaatgaatatggtttaacttgagagcaaataatggaaggatgcatttttaaatgctttgattcccagctttttattctgcctctaactagctattacaataccacttaatccggacctcagcattccaagtaccaaagcatctcctcccacccactgctcacacgctcctgcatcagaatagaagacttacagaaaagctgccagacccacagaagagcactttcctctcaacagatgtcttccagcttttaggcacacacacactcagacacacttgcctaccttaataaggtgtgcaaaaacctctttcggtccccacggatgcttttagttcagagcagccagcaatgcctccgcacaaagctttgccattgctagtgtgaagagaaagagctgctgggatgctgaatggcacatcagccaactttgtgtgtagcaaaggctctaaagaaatcctgggctgaaactctgctggatcatggattggactcaatttcactccacacacagtctgcattacctgatggagattatttctggaagcacttagggcatgtttgtctacaaaaagatagggcctttttctttccttaacaatttaaaaaatacggtaacaaaccagagacctgatactttaaggaagatcatttattgtgagctccatgagggcctcaatggtctgtttcgaaattgcagccccagcatctagaacacagtcagcacttgataaatatttggctaaatattaaatgctcaattgatatcaggttcaaattagaatttgctaaattatttacacactgtaatgaaagtaaaaaatgcaaggtttgctgaacagctccagagggttaataagagtgtgtgtgtgtatccttttgtcattcaacacacacacacacacacacacacacacacacacacacacacacctgtatagctgatgataaatatacattatatcaatgagttaaaataaagtgtgctattcattcactgagcaatggggctattgcctgggcacggtggctcacgcctgtaaacccagcactttgggaggctgaggcagatggatcacaaggtcaagagatcgagactgtcctggccaacatggtgaaaacccgtctctactaaaaatacaaaaattagatgggcatggtgacgcacacctgtaatctcagctactcgggaggctgaggtaggagaatcttttgaacccgggaggcagtggttgcagtgagccgagattgcaccactgcactccagcctggcgacagagcgagacttcgtctcaaaaaaataaataaatttgtaaaaaaagatttaagcaaacccactgataacaatacttagaaagtttgttgaaaaccgtatgtattatttgcttattgccctgacaatttctaatatcataatagttcattataatagcccattcctcagtgaatgaatagcacacttcatttgaactcattgatacaatgtatatttatcatcagctgtacaggtgtgtgtgtatacgtatacttttgaatgacaaaaggatacacacacacacacacacacacacacacacacacacgcacgcaattattaaccttctggagctgttcaccaagccttgcattaaacctggattgaataaaagactcccattcctcaaggaaattttacttcttctatgaggacttctcagtaaccctaaattcacaggcatattctttacatgttactgtcccaaagcaaaatgcaagctggcatggaaccaagcccagaggttaattcctgaagctagaggaaaaggttccaaagtgccctacatcccaaggtcgcccaacagatccacacctggaagcaatctccgccaagcgcctatttacaggcacaggtgtgtgcctatcgggacagctgaggaacacacctaatttgatagatgacattctgatgtggcaggctttattgtgctgtttatgacaatatctgcagattatgatgtgcttgtttaataaacagcgtaattaagcacacacaaaacaaaacaggaagttaatacctaagtggtgctgacgtgtttatgtaccacaactgactagtgtattctttactgcctattactccacttcttaatatccactgaaggaatcctcagtctgtatacacacatctccaagttatgaacatcaacttcatgcatatcctcagaaagacctacttacacctgcagcctcaccacatatatctacacccttaacaggcattcaataaatacttgtcaaatgatcagataaatgataaatgaaggagaaacataccaatatttatatcttcaagattgctcctatgggcatataattttacaggagttgctacttggattgtctatct

SEQ ID NO: 2029 - DNA, 4001 bp, Homo sapiens
tttctacctagaggtagtaactactcccgtcatttagtgtatactcccataactattattaagtccatttggtcatcttctacctcccttcattatcactttttctctagacacagaagaaagcacaaaatatttttaataaagagaaatgaattaagaaaggcaactgcttagaaagcaggaagcctggctttcattccccgcccttgctagatcatttaagttacaatgggcgttttacttactatctctatccttttgttcctccacggaactattgcaaaactggtataacaagaacttccctctgccctttttacaaagatgctatgatgcatccattaactaacttctccaaagaaagctggcacatagaagggggcaaaatataaagtatgtgagtatactacaactaaaagcttagtttacagaggatgtgttttaacaaaatctgagaggaagcaaaagacaggaagttgctatagtctctctttaactgtaggagctatctcctctaaactgttaattataatgtgttacaggttttatattatataattgtaatgtgttataaagggttttaaagactgtcctctggtatgcatttagactaatgccaaaaataattccataatacatatccgttaattttttatcactttttgtataaccctgtgatatgccaagagagaaatttatgaaactagaatagctgcactcctcatttaaattcactctgatgtcttaatatgcatgtctcctatgtttataaaacattaccactttaatctaatctgaatcctcaagtatcatctccataccaagcaaataaatgattcatttattcaaaatacagtgaatcattctgaaattggatgatttacgtagacatgtgagataccagttacttgtgctaagacaatgaggaaaatttggccattttaattcatttgtggcctttttgctccacatcttttcctacctaatgttgagagactttttccgaagttcactccacttgaagttcatgttatccaaacgtctttgtaacaggactgcatcatcggaaccttccagggatctcaggattttttggctgttttcatccaggttgtgataaacatctgtgtgagcttcaatttcaccttggaggtcctacaggacagcaggaagaagaatatgtgcagaattaccaaacaaaagaaacaagcgatgaatgtgaatttggagaattgcaaaatataaataattattagttcaaaagacatttcaatcaggctaaactaacaagaagatacatctcaaatcccttttcttggcgtattgccttctcctgttattatgtagatttaaaatgggcatcttattagttgtaatagatttattccttgccattatgagttggaaagtaatgtatttataactttataaagttcacaagttatatcttctagtctatggacaaaatgtattattttatggaagtgataggcaataaaattctatgataaagtgtaccccagtgccaataatttcattactatatggatcaagtcatattttctatttacgtagtaatctgtagagttaactctgaccataaaagcgtggagagactaataaacaagattgcacttggcccacagcaccagcacattcctgggagtctgtcatgggagagaaaatcttcttgacaacacaaattaagttcaccttggtattatagcatcatacatatagtacagcatcatacatttattagttttgatttcccatttaatacacatttttaggcttgacaggtggaaagtacataggaccttggtaagagttatgataagaggttatgcattcaacttcacttgtatacacacagatcaagaaaattattatagtagaagaatctgacctttacatggtatgtcttcctgtgtaacattttcagcttgaaccgggcactacagcactgatcctgttgcatagcaatcctgagaaaacccagaaactgaaagagccctgctttaaaatgccaactttgcttacattctgttgacagaatgaattttggagcacaggcctcaccagtcaataataataaacggccactttgtactccgcactaaacagtagccaggcgtgtggatgtgggaggaacctcaaagagaggaggcctggaatatgcaactgacagtttatattaaacagccaacttttcttatcattctgccattacaagccagagacattataaattcattttatatatgtgtttccttccttgttcccagcagaatagtcaaagccaagggaacattcctcagagagctgccgggtaccagcattcctttctgcctacacaatgaatggaggctttgtatattatctgacttgctcttagagatttgtatgcttctgttcaacaagtttaaaaattcattctgaagctccaaacaattggattgatctgtgtaactagaaaagttttttttttctctctctctctcaaattgaattaaattactctgctaaagtaagggagaaaaagtggcagaaataacatgttagaaattctgaagaactggctcaagttttcagccacagcctcttaagatgcagaattctgaatgttgaacaagtaaggtagacagacaatgaatgtctattgtcactatttttggcagctaaagcatcactgatggactctaaagagagttgtgtcccattctctttgactgggagacaggcaggggaatatggatagaatcacatcagaagttgaaagaagggaaatactgaaagtatttctgagtagtatctctgagtagtacaaaccaggtttgtactggaaggatatagcctgattttgaaagtagtttatatggtagaaggttagtattgggattcttgcagaacgaagtttggtcaaatatatagccattttatgtttttctttcttttttccttttgcctacgtggaataacatgcctgcctaatttgcacttcttcagcaaaagagaaaagtgagttaatttatctaagtacttcaggagaaaaagccaaccagatctaagttccagataattccttcacttgtcttttactttacttcttctgttgtacttgatttgtacagtactttccttttgtgtatgcacttaggggattaaagacaaacttttagttgttcaagtaaaagtattctcactagtagcatcagttttctatgtttactacattaacatacatataaaggatagtacatttgaaatttatatcctacattgatagcagagacccaggctcaatcacgagctccttaaggttatgtataccatgaagtcaccaacactttctttgtcttctcaagcataaataggatgttgattcatgaatttgctacttttcatctttgccatatatattatactgcatataaacatctttgttgtattatcaacaaataaatgaatataaaattgataaacaagcatttattgaggactgatttattgtctagttttagcactttgggaaatgtaagaggagtacaaatgatagttctgtctttaattttcctaaaacctagtgtgcatttttgtttaattcgtttatattaccaactaaatattgacggcaattcctgccaagtcttcatagatactgggataaagactccttcctttagaaatgcagaaatggctaaagttatcttagcattggcaagaagataagtcttctgtcagtactgcttttctaggtcatgatggtgatacagagctgtaaatgacacgtgtacagtaaagggctttacaggttacaaagcacgtacaaatgtaccaccttagttattcctccccctggctctgtgaagtacatcacattttctgttttgcagatgagagcactgagactcggatgtttaactgacttgcctaaaagccatatagctgataagtgttagaactgggaaatggatccaattctcttgattctagaagat

SEQ ID NO: 2030 - DNA, 4001 bp, Homo sapiens
gaattgcttttttagtttcttaaaaacaaacattaaacacttataaaaagtaacaaatatctactgctgtggctgggaaaatggcagttgcctaattaaaataagatttcttctgccaccattgttatttggtactgaaaatattccaaacagttgcctttttaaaaaactatctgtccactacttcccagggagaaaactaatcgctatgcagcaatataaaaagggagcgttctcttgcgatttgcagaggattagagtttggtttcatatataatctggagcccattgatccacacacacaaatgatttccctttaatctgaggatcagactctttttctagaggaaccttggcatttgcgtgctgaattgttgaacttggcttgcattgctggaatactggcagggtgtggatggtaaaatatattttaaagtttctgctaccgtggggcaggggtttggaggggtgggcatcaatataagcatcagaaatccattctagttccccatttcttgttccctgggatatttaccattttattctgtctggctaaagccagggcaaagatgattgcctcggtggctgttccagctgttagttgtcctccgttttatttgcttttcaaggtttaactcctacccaccctcaactttggtcaaagcaatttcttttcagggtcgtgtccaatcggagatcaaacaatgatgactgaaaccaattccacggtgttcaagggtcagagacctttcatataaccgtgttgcttcatttgctccactcgcttctccaacagcaaatgtatcctccaaagaggggcttgagtaaaaggcaataaaaaagctaggcaaaaaaagaaaggttgattgggggtgtggggggggggggggtgggtgacaaggagagatgacagggataaagcagaagaccaagaagagtttattgcccaaggaaaaatgtagatttcacttaaagacgccacttaaaagttcaccacttaaatcggatggatttttttcatgatgtaaaaacagtttataattaatattatgcctccctcgagcaactaaaccccttcaatttaaagcttcaaacttaacttcaaatttgactaatataagcaaagtgttctgccctttttattgccgtgctgggattgggagtgacaaactttgcttgaagatgagcacagacacctggagaaatgcgagagaacaccctagaaatgactccacacccaatcccgaagggcaaaaaaaaaaaaaaaaaaaaaaaagcccaaacaaacaaaaatccccaccccctgaaatctttgacttctgggctttagttgtttgttctttctttcctgatttctgcaggtcttggggcatggaatgagcacggtagaaaatgcagcgagggaaatgtcagttggaatcctcggaagaaatcaggcagaaagttgaccttttggcacttgcagtgcaatggaaggtagcgccgcgtgcgccccttccttctacgagtaagagcgacgatttaggaacagccagccttgctcacgtccacactggcagcctggaaaggagtgaaaagctcccccggccccaatccccgcgtgaggaacgcgttatcccctctggggacggggagaaatcagctttttctctccgagcccgtcccaaagccgagggaagaggttcccccactagcccggcgcctggggagaaaccccgggggcgcacctgcagccgcgccgcgggaacccgcgggagaggttcctagacgcccagccgcccggcgccccgggtccagccgccgcgcctgtccaagttttgaccgcctcagcttgccccctgctcgcgccacaagtgcacggattgcggccatcagacggggccggggccgcgatccacttaccctttgagctgttccctcatggctgcaagggctccgcggtcgagtgtgggtacgagtggaggagtgagcttcccagagccgccgggctccccgaaagtggagcgccgccgccgccgccgcccaagctcacagctgaaagcactgcggaggagccggcgcgggcgggccggggagggggcgctgcgggcagacggggcggggccgtgtcgggctccgcccccacctagggacctgggaacccggacacccagagactgggcagttggggctttcaaaacggaaaggaaaaagaaaagagaaagaaagaaagaaagaaagaaagaaagaggatggggatttaaggtagacccaggaacctggaagccacacaccgctctgctaacacctccttaaagcctctagcaagactacttgttgtctaaataaatgacccaggtgcaaatgacctcatcccagataattaagagtgtgggcttggagttttctttttaaaaaataaaagaaaaaaattatatacataattctcactctcccttcctcctcagttgaagattaaagtggccggcgataaggacgtgaaattgccgttaggctcatcctgggctaaaagggattgttaaaaagactttggatttggatttgtgacatagcagcggatctcaaaatgtagaccctgggaacagcagttatcagtatcacctgcgaacttcttagaaatgaaaattccctgggcccggcccagacctattgaaccagaaactctgagcatactaatgtttgagaatcactggtatggactctctaaattaagacaataccaccagtgctgttgcacggtttggtcctttagtattcttttaggaagatctagaaggaacttgtttctaatagaatattttattggaaaagttacagggcctgaacagttcaaataattctaattttagagtttgcagtatgatgatagaagttaactacacacaattatttcaagcttggaaatactcaaaagaagaagaaagccttcattagcacaagaattttctgcaaacttcacataacaccttagattagcatccaaagagcatcttacgataaactgttagtgatattttcactgcccttctttgtccatttattttgttggcttgcttttctttttattttctttcaaacatttgctttccactctcctttccgattgattcattccacttcggtctacagtttaaatgtggtcccctttttaaaatttatttcttaagggatgggggtctcactgtgttgcccaggctggtctcccaactcctgggctcaagcaatcctcccacttcagcctccaagtgcctgcgatgacaggtgcatgccaccatatccggcttcttttgaaataatccttttctgctcaacatttttccccctagaatgttttaggtggaagcacacccgttttgctttatctaatgctatagcatggcaaaagaggcaaaaataaagtatctggacaaaagcaaaagggaatgccaggattctttattacctttaacaaaccaaatataaaggtaaatgttatcactaaagatatgtgcatgtaagtatgatcggtattgctatttttaagcaaatatggcacttcttctggcattctggctcatacactgagattacttagtgttgccctttagcaattttaagctagtgagttgtggaggcagctgctattacggtctgaggggggcacactaagatttgctttggctgaagttgtcccttggtctaatagtatattctaggtctgctccgatccttggggaagagggattagtgtcctgtaatgaggaagtagtgccctttgcagtaaatcagagacaccaatctctgtgtcagtgtggcaaatcacttaactactgtttatgtttatttcaacgaaaagacagaagcctcagagcatggacatttgtaaatattacaaatcgataaactaaggatttgtaacacctggatagtaagacatttgtcactctcttcctttcctgttttttgtttgtttgttttacacttttaaattacctgctcaaaattcaggagttctgacacgc

SEQ ID NO: 2031 - DNA, 4001 bp, Homo sapiens
ccactgacggctttatccacatgcagctgcaggggctcccacggctgggaagagttgaccaacagggcctggccccgcaggacagcttccgacagcagggccaggccctgccagacttctacggcctgctgcccgacctacagggagtggactctgggagtcagctgacccatgtcaccctctccctcctgcccctcagcagccccaagcaccaagctgagcaaacagaaggtatgcaataagacttgttgaatgaatgaatgaatgaatgagtgagtgagtgagtgagtgaatgaataatgaatgtattccatacagccctcattatttttcttttttcttttcttttttgagacagggcctcactctgtcactgaggctggagtgcagtggtgtgatcacagctcactgcagcctcaaattcctgggctcaagcgatcctcccgcctcagccttccaaatatctgggactaccaccatgcaccacctcacctgactaatttttttaaatgtttgtagagatgggggatctcactatgctgcctaggttggtctgaaactccagggctcaagcaattctcccatctcggccatctcagcctgggattatagacgtgagcctctgcgcccaggcagcctcatctctgctgctccattttacctttccctcgatcattctccctttcatccaaaatcaggctcgcaaatgagattctccaaaagaaaggaaaaaaaaaaaaaaaggaactcacctccatcctcttccaggcatagaaattaactttggtgtctgggacagtgatattctcattcaagctgcagtgttcagcacagcccgtctgaaatgcacacagcccggggagtcaagggtccctgaaggctctggccctggcccacaggccgtaggatctgctggctttgctccttgcctagtttccaggtatggtttggggccaccagacttattcttatgtaggggggcagtgtctagcttcccaactccaccccaaaccaagtgccaggttcctggatctgggaggagttccctgaagccctgagcgtgagttctgtggaatgtgctggggaaggggtctcaccgtgatattctcggcctccttggcctccaagaggtacctctccaggactcggctgtcacagatgaggcgtggtggggcgcccaggactgggaggcccagagggagcgacagcagggacaggagaagccacagccaggcaggacattctagaacagatagccaggctgagagtcaggcggggagggagaagggtggctgtggaaggacagcttccttcatccccacgtctctgccccagctcgtccttcctgtccccaaccatgcaagcactcaggtgctgcctccctggccttcattcaatcctgctgccgtgtgcacaccccacccccagctaccagcatccacttctccggccaaacttcaatcctggtgtgacagaggcttcccctctggcagataagtggtggctccagcgcccaggttatcagcttatcagcttcctctccactggcacagcagaacccccaaaccttcttcccctcaacccccaaactgtgtccccttcacaggtcaggtttttgccatccccaaggactcccccaagtccccgctggcacgtggaggctgccccacccccctcccccttccggggtccttgacaagtcgccggtccttgaacccagccacctcctggccaatagccggggcgctaaatccccgctcaaacagggacccgggcgggcgggagcgcccagcccgcgagtactcaccgtgcacccccatctccgcgcctggccggggtccctcagcgacctggggcgcgccgggtgaccacaccgggggccctcatcccgggaagctcggcggtgcagggccagccccacgggcctggaggagagggcggctgtccagggggcgcggtgtcggagcagagcgggcgcggtggccccggtccggctccgggaggacagcgcggtgcggcgcagcgcagcgagcggccggggtggcccagggactctgcggctctggccgggggtcggggctgttatctgcatgtgtgcgtgcgcgggtgggggtgggggagaggctgtgtgcgtgaggggtcgccaggggtaggggccacccggggtcagagcaggggcaggacgcctgggttgaggctcgccggggcgtgagcggggctgctgcagacgtgcgtgtgggtcatgggggctgctcccgggccctgggtcgcgggaggggagtgcagccggttgcgcacccttgggactggcggagcgtgctatctgggaaaggctgggctcccggacacctcccctggggggcatcccggtcttgggcggagactcagagatgcctgggttgctgagttccgcaaagtagctgggtctggaagcccagaagctttagggaggggcaaatgagtggtctcccttcccacaatcccaggacatgttctagaaacaatgttgaccatgttgaggaatttgatgggggcaaatagggcaagaaatttggggttcttcctccccacctcactcctcaccgtctagtactctgcaaacccagacacttaacttttttttttttttctggagatgtagcctccctatgttgcccaggcagtgcagtggtgccatctcccgttcactacaacctctgcctcctgggttcaagcaattctcctgcttcagcctctggagcagctgggactacaggcacacctttacacccggctatgttttgtatttttagtagagatggggtgttgccatattgcccataccggtcttgaactcctgacctcaggtgatccaccctcctcggcctctcaaagtgctgggattgcaggcgtgagccaccgcacccagcccccaccccagacacttaacttttagtgcacagagcacacagtccattgtgcaggacacacatgcaccttgacatctgtttatttgacctgtggtgtaggttagctaggctgcattgctgagttcttaagaacactgaaatacagctaacaccaagagtgatgggggctgggatttacagctaaggttttatggcttctggaaaccctgagccagaggagtgagattcccagagcaggagaccaagactagctggtctctcacaccttagaaagtggcctcgtccttgagccctcaatgtcctcatctgtcaaatgggtgtggtgaaactaccagcctatcccattcaggtttcataaaagacaggaaaggtccaggcgccgcagctgacacctataatcccagcactttgggagaccaaggcaggaagatcctttgagcccaggagttcgagaccagcccggacaacatggcaagaccttgtctctaaaataaataaataaataaaaaataattagtcaggtgtggtggctcacgcctgtagtcccaaatatgcaggaggctaaggcaggaggatcacctgagcccaggagttcgaggccgtagtgagccatgatcgtgccactgcactgcagcctgggcgacagagtgagagcctgtctcaaaaacaaaaaaagactggaatgtgtagatctgagctgtaagagttagccgggagaaatcaagaaagatttgagggaggaggtgacaatgacctcagccttgaaggggggtaggacatcaatgggaagaggtatgaggtgggtgggggattgtcgattcagcaaagtgaatggagagtcaggtgagtattgcgggatctggccagcagcccgcaatgcaacagggctctctctttgttcccaggcggatcagcaggttgagaaataatagacacacacaagatagtgaaagctggtccggggggtcaccgccttctggtcccgtggtgtcaacaatgcaccagatgtaccatcatttattattaagtttagtgagggcgggggtaggttagtgagggatttagggtcatttgattatgaggtgagatggt

SEQ ID NO: 2032 - DNA, 4001 bp, Homo sapiens
acactcccgggacacccacactcccgggacacccacgcccccgggacacccacactcccgggacacccacgcccccgggacacccacactcccgggacacccacgcccccgggacacccacgctcccgggacacccacgcccccgggacacccacactcccgggacaccctcgcctccgggacacccacactcccgggacacccactcccccgggacacccacactcccgggacaccctcgcctccgggacacccacactcccgggacacccactcccccgggacacccacactcccgggacacccacgcccccgggacacccacactcccgggacaccctcgcctccgggacacccacactcccgggacacccactcccccgggacacccacactcccgggacaccctcgcctccgggacacccacactcccgggacacccacgcccccgggacacccacactcccgggacacccacgcccccgggacacccacactcctgggacacccacgcccccgggacacccacactcccgggacacccacacccttggaggctggtgtgagcagagccggtgaccgccctggggtgaaagcagatttgcatcagaaaagctctcaagaactgaggaaaacctgatgaagaacacacgattatctggaaggaacagaatggagcaaagaagataaaatcgcctgcaccccagtcccagggaaggccaagctggagcggtcacttcctctcgagcagggaacaccctccttggggggcactgcagtagccaccccgcgggctggctctttgccatgggaggggaaggaggtgatgttggcccccactgggccccaggacaaaaccagtggcagtccctgctcacctctgtgaggccccggcttccacggcatgtcccgtgtttctcctcctgaggccttagcgaccccgcctggggcaggaaggtggccggggtcataaggccatgctgtgagctagggctgcagccccacatcccaggcactgtccctcacagcccaccccccactcgccatccccacacgccatccccacgccccactagccatcctcacgccacaccccctactcgccatccccatgccccactcaccattcccaggccccagccccactcgccatccccacccccccatgccccatcctctgcaccccacacgccctttccatgccccatcccccacaccccacatgccccatccccgacaccccacacaccccatcccccacacctccatgccccatcccctgcaccccacacgccctttccatgccccatcccccacaccccacacactttcccacacctcacccccacaccccatgccccacatgctgtttcccaggccccacccccccacggcccatcccccacaccccacacgccatccccacccccgatcctccacaccccatcccctacgccccacatgccgtttcccacaccccatcccccatgccccaggcgccatcccccacgcaccgtcccctacctgtgctccccagcctgggagcaccctgtgcgcacttcctgcactctgagaggccccagactccctgcgcttgtccgacctcacaggcaggggcccatgggggccaggaaagcaccacccactcctaaagttctttgaaaaataatcccgccaaagcctgggccaccaagaagggcctcccctcctgtgcctggatgctggtttctagaaggaaagaaattgaacaggagccgccagaaaaccctcctggtggatgggggtgtccggagcaagggcggggtttgggaagcccgggctggctcctggatttgcccactgcccttccaccaagtttatggagaaaacctccccggacgcacctgcagccaggcagccctgaagcccaagcagaaggcagaggagcctgagggcctgggagaccatgatgaaatctctgcagtgctgcccctgcctgttgacattccccatgggactgacgggcaaagttctctgcctccaagggtgacagagggatgggggaggggaggacacaggcgtcctctgaacaccccagctgagagctgcacctggccggccagtggccatgcatcccctgctgcccagccactgagctcaagtgggggggacaggagaaaggtcaggtgaccccagctgtgctgcagagcggacggttttgttgccagcgtgcaggtgttaaggtgtgtgtggcaccaacacttcaaatacgatctagaattccaaacccctaatgtaagttgggaaacagatttaaactgcagatgaaaacttgtcccatagcaatcatgcgagtcaaatctcaagactgtatcttgggtgtggatgtaaatatttgaagagagcctccagaccaggccagctaggccgttgcctgcaagggaggctggtttcttaggtgagccacagagcctcactgagaagtgccgggaataggatcattctggccctgagctgggcacccccactccgttttgactgcaggcagcacccccattctccagcggtccacatcttacgtctttttgtttgttttgttttgtttgtttgagacagagtcttgctctgttgccaggctggagagtgcactggtgcaatctcactgcaacctccacctcccgggttcaagtgattcttgtgcctcagcctcctgagtagctgggaccacaggtgcacgtcaccatgcctggctaatttatatatatatattttttttttttagcagagatggggtttcaccgtgttgaccaggctggtttcgaactcctgacctcaagtgatccacatgcctcagcctcccaaagtgctgggattacaggcgtgagccactgtgcccggctggcggcagtccacgtcatttctacctgctgtcatgggcccaagccacaagctgtggtgactaaccaccccaggttgcccagggactgagggttctcagaatgtggaactttccatcccaaaaacactggggtagacggtcatccaagcctcctgggttgcccagcaggcctgtctgacccctcaagcagggagtatcctccatgtgaacagttgcattgctgatgacttctttggaagctgatgtccagttctttttacggctggagggagggaggtgattccttcccaacagccaagtcttagctcaggggtgcctttcaaagcagcccccagcacccccaaagcctccctgcttgctgctgacctgcatctcagtccagagagcagagcacttgctgaggggccgacagggcatgttttctcttccacccagcacagctgaagcccatctgtgcccctccatgatatcgatcccagggagatcgcttacaaagtagctgctccgtctggaataaagctcacgtccagctcaaatctggtccccgcggctctcggccagcacagcccaaggtaatttcaggacgtggaggggagggggccatatctaaaccctacccctttcccacctgagagtagatggctggctggtcttagggtacccttcccctttggggctccaggtcagaggtcctcaaccctctctgggcagcagaatgacctggggaacctcaagcgccaaaaccccctgagagattcagtggctcatggcctcggggctggtgaagctcttcaggtgatggaccctcacctgcatgcagccctctctgtgcgggcaggcgggagggggcaggaaccgggctatctggctgggctctctgcccgtctcactgctggccagggcggctgcaggtgcccgcctatggccattgtcctggtgtgggtccttgaggacacaggtgtgaggggctccacctggccccggggacccgctccatacctccctgagggggacctgcctgctggtctccctcccacgtctgtcccaggggcatgcctggaaccttgcctggggctggacccggccacacggagtagcaggtgtgggggctgctgcaccatcc

SEQ ID NO: 2033 - DNA, 4001 bp, Homo sapiens
aacaagcatttaaaaagatgctcaacttattagaaataaaaataacacaatgaaagtaatgatgcaatatcactctacacctgtaaaattggcaaattttaaaaacaggataaaacttatcgctatgtgaatgcagagagaaggccattttcatacttcgatggtagaaatgtttgaaaagttctgacctctttggaaattaaaacttagaaggaaacattcccttcgttccattaatattcctcttgcaagtttgttcaacagaagtaaaagcaccagtatgtaatgatataggatatagtagccaaaaactggaataaagtgaacatattgactaaattgtgatacagccataccatagaatcttatatagccaataaaaataatgaattaaagctataccaattgacttagagttctagtacgtgttaatgagtgagaaatgtgtgtataatgtcccaattttataaaacaaataatgtccaagaaaacctttgtgtgtgtgtatgtgtatgtgaatatatattatcatactggggttacctagctgaggtgggggagaaggggactgatgtggaaagagggtggggagccaaacagaaagaaccaaaaagaatataaagtatgtacaacatgaccacatttaatgtttacacagccacaatctatgtattatatttaaatctttataatacacatttaaagaagacaaaaaaataaaataaatgatttcagcattcaactcaagaagcaaaaatctaacaacaaaatgaaccaaaggaaattagaaggaaggaataaatcaatgaaagtagaagcagaaactgatgcaacagaaagaaaaaagagattgataaatcaaaccaaaagaaaattcttgacaagaccaataaaatcaagaaaactcctggaaatattatttttaaaagagaggaagagaacatatacaacataaggaatgaaaaagaaaatataactacagacacagaacagtttaacaaaatcacaggagactcttacataacttgataccaatacattatcaaatctagggacagtagattgctttctatgaaagtatagaccaaaatataccaatatttactgaagaagaggtagaaaaatctgaatcaactgatgaccatagacaatattgataaagttatttaatactctgcctaaatgcaccagaacccccaaaacacgaaaagcttctgaactcaaggctcatattatccttacacccaaagtaggaaaagatattataaaaacacacattgcatgtacacacaagagaaccagacatgaaacttgtgtgtgatattgattggatttcattgccttgattctctctatggaagcttgggcaggcagagggaagttttgtctttgtcccttcaccctccctctactccagtctctagattctggaggagcagcatatgacgaagagaagcaatggacaaaacagaacaaaatatcaacaaataggtcagacctatgaaaagaattggcagttagcatttctgctaataacacagatgtgtgcacaccttacccagaaatgtttctttggggcccaggtagcatcacaaccatcctaacccgatgtctgcaccttcctccaagcagacttacatccccacaatcctggccccgatcagaccctacaggacatgcctttaccttgcgtccacaggcagctcaccgagatcactttgcatatagtcccatgacagttccactgcacccaggtagtatcttctggtggcactaaagcagaatcgcaaaaggcacagaaagaagcaggtggagagctctatttgcatgacttattgctacaaatgttcaactggagaagcaaaaggttaattcttctctaaaatatctttagctcccaggaggggaaaaaagtaaaatttctgatttaatgaaaagtcccaatttctttgcagagcattttaaggaactttacccactggatgtgctcagcactaagcagtaaccgataggattgcttcctttttatcagtgggaagcagccacaggaagaactgaagtagcaaaagggaggctgctaaacttaacccattcacttctgagagcagtaggggcataagtctgctttaatcagaacctttaaggaaaggaggagagggatggagaagtcaaagtgaacaggagctttaatttgtgctcctattcctagcctactccaaccctcttcctgagtggcagcagcaagagaagttctggatgttgtcgaagattctagaattcacttgcactagcaagagtaaccagcaacctgttagtctctctgcttttgcccttgcccctcacactgctgccagtatgaggaatttatagtttttaaaactgtagttttacatataacatgaggttaggcaactattgttttaaaaactataatttatagttataatttaaaactataaagcgagtcctgtcactcctcttctcagaatcctccaatggcttctgacctccatcagggtaaaaccctacatctttaccatggcctaggtcctagagcatcccacatggtctgcatgccctttctcctgacctctgtagtctcatctcactctggttatactggtctccttactcttccctaaaatatcaagcacactcatgcccctggacctcaacacttgctatttcttttacccaaaacacctttcccccagatttccacgtagttccactcccacaactccttcacatttcagctccaatcttccctgttgaatgaggtttaaatatggaacaccacatttatgttgtaagctctttacccccacctgcatcactgatatccctcttggcttcatttttctcaatagcactcataaccacctggcatttattcatttatttattttgttttgtttttaacctaacacttttccaggctgtttacatttggcccaggtataggatatatctctttacatcagaatgtagccatggtgagctcaaacaccctactcaggttaatgtttattagggagagtgagggcccctgcaggggcctcaaagtgtaagagattatgagaagaaacttgatcagggttgctataaaaatgttatcattgagctcagttctgcacaaacaagaatgtgttagggagcaattggtatattgtcgactggtttggaaacaggcagcaagaagcccctttgataaacactcctctctgacaggtacaaggatgcagagatgacagctgacactatatgccaggaactgttctaggtgcttttaaatacaggtactattcttaccttcattttatgggtgatgaaactgaagcacggagaggttaggcaacttctccatggccacacagcttgtgagtggtagcattcaaacccatgtactctggctccagaagtcatgctcctaaccactatgctatacttctatgcctcagaaatgaagaaatcccagttcccaaccccctgggaatgacagtccaatggaggagacagaaaagtagacagttacagtacagggtgataaattcactgccaggtgctacacataggctatctgatttaatcctcatgacaacaccgcaaagtggatacagataaagtaactgaggtacagagaggttaaatggcttgcctacagccacataactacccatttgtcctagacagatattgtcctaggcactgggtacacattgatgaaaaatataagcaactgaaagagggatgataagcaataattacaatacatgagtacattatacagtatgttagaaggtaaaataagtgctgtgcaaaaaagagaagtggggtaagggggagtaagggtggaccaggttgcaattttaaaggaggttagtcatggaaagtttcactaaggttgcatttcagcaaagggacattgacttctacactgagggcaatggggagacacggccgggttgtgagtagaggagggtggtgatcagaattatctt

SEQ ID NO: 2034 - DNA, 4001 bp, Homo sapiens
catggatgcaccctgatgaaaccattacgctaagtgaaagcagccagacacacacggcctcacatttggtcgtataattccatctataggaaatctccagaacaggctaacctctatggacagaaagcagatggactaggggttgccagggactatcgggaacgtgtgtatgggcgggggcagggggtgtgtgtgggagggtgtgggggctggtagtggtggtgtggaaggaggcgtgcggcaagtgactgcttataggtacaggggtttcggtttcttttcggggtgttgaaaacgttttggaactaggtggtcgtgatggatgtgcaacattgtgaaggcgtggtacccgtcctcccctcgcccacccctttgtctttcccacggtgttcccatccagtagaaagggaaagttcccactggcaaagagagggtcaccagcgcgattccccctgccccgccccaccccacccccacggccctccagccacttctaggcccaggcctgctccctcgaggccaatgggaaagtgatgaggtcacctgacggacgtgtgtcccttgtgaggggccgtcaccacatgcgtgcccgtcgccggatgtgcgtgcccattggtctcggctccctagccaatgaggggctgggccctggtcgctaggatacacagtactggacgcggtaactgtcctcttgagagccatcttgcctagctgggccaagccgagatagcacactcaacgcccagcatgccgaggaggaggagacgccgagggtcctccggtgctggcggccgggggcggacctgctctcgcaccgtccgagcggagctttcgttttcagtgagccaggtggagcgcagtctacgggagggccactacgctcagcgcctgagtcgcacggcgccggtctacctcgctgcggttattgagtacctgacggccaaggtcccggagctggcgggcaacgaggcccagaacagcggagagcggaacatcactcccctgctgctggacatggtggttcacaacgacaggctactgagcacccttttcaacacgaccaccatctctcaagtggcccctggcgaggactagcttctgacacccggcccctgggacctgacaggtccactcgtccacccacccggccccaaatcccccggcctgaacccccggccttaaacaccctccccccacaacccaggccccaaagtcttgggccttcattaattctgtcaataaaatgtttcaaggaagccatctgcccgcttcagtcactttgccttggggtgggggtgggggggcggtgagatgggttggggggttgtgagacctccacagctggagggatggagaggtggtgggggtctggggttgggtgggagccagggatggcacagaggagcagtctctccgggtgacagtgcaggggagtggccctgggtgggaaggggacacccccgctggttctgagcaagtcagggcctgcccgggaaagtcctcagcatgatggtgttcgttggggcgggtgggcctcaagaccatgactgcagtgttgcgacaggacggacttctaaggcaaccggggtggggacggagaggtggacccggtgcttggcaaggggccctggaccggaagacggaggactgagtagtcggggcggggggggggggggacaacagtctagaaatgcgcagacatggaattagggtcacgagtttcgtttgggtcatgttcagatggagaggctgtgggatgcctttagcaacctagaccacttgcattgcagccgagctagcagcagctggtgccccgccaggccccgcgtaccttcccagggtcttggatccgcatccccgagaccctcgatttgcatacgccgctcacagcccggccaggccccgcctccgatcccgctctttgcacctcatcagggcaaggggcaggctcgggctggggagccggcgcgggcacggcggcagcccgccgagggggacgcagggcacgtcgccccgccccggcccgcccgccagctgcggcggcgcgtcgggaagtgcttggggcggcgagcatggcggcagcggctgcaggcctgggcggcggcggcgccggcccgggacccgaggccggggacttcctggcccgctaccggctggtatcgaacaagctgaagaagcggttcctgcggaagccgaacgtggcggaggccggcgagcagttcggacagctgggccgggagctgcgcgcccaggagtgtctgccctacgcggcctggtgccagctggcggtggcgcgctgccagcaggcgctcttccacgggcccggggaggcgctggccctcaccgaggccgcccgcctcttcctgcggcaggagcgcgacgcgcgccagcgcctggtctgccccgccgcctacggggagccgctgcaggccgccgccagcgccctgggcgccgcggtgcgtctgcacctcgagctgggccagccggccgccgccgccgccctctgcctcgagctggccgccgccctgcgcgacctgggccagccggccgccgccgccggtcacttccagcgcgccgcccagctccagctgccccagctgcccctggccgcgctgcaggcgcttggcgaggccgcctcctgccagctgctggcgcgcgactacaccggcgccctggcggtcttcacgcgcatgcagcgcctggcgcgggagcacggcagccacccggtgcagtcactgccgccgcccccgccgccggcaccccagcccgggcccggggcgacgcccgccctaccggccgcgctgcttcctccgaactccggctcggcggcgccctctcccgccgccctgggcgccttctcggacgtgctggtccgctgcgaggtgtcccgcgtgctgctgctgctcctcctgcaaccaccgcccgccaagctgctgccggagcacgcccagaccctggagaagtactcctgggaggcttttgacagccacgggcaggagagcagcggccagcttcccgaggagctctttctgctgctccagtctttggtcatggctacccacgaaaaggacacggaagccatcaagtcgctgcaggtggagatgtggccactgttgactgctgagcagaaccacctccttcacctcgttctgcaagaaaccatctccccctcaggacagggagtctgatccatcccattcacccagtgacttctttttgcccaggcctggactttttgcatcagtcacgttaaccagatgactttgcctgttaccaaacctcatgcatccacgtttgcgtctggggaggaataaaaagacatcgttcccgcttctgcgttttgttattcctactgccgccataggaattatttcgttggctgaacgttaccagcaccccgagaacacattttgatagaatcagagtagaggacatggctgtcttctaaaaagccacgacatgaaaatgacaatccctttcgtctccttcctccgctgcttccacctaacgcagcctcctgcctccgcctttgtttcatagtgaggattttattttgcacggcgccctccctctaaatacctaccctagatgatttcatcctgcccctcacttcttaacatattcctgtgtctttgtaatggccaaatttctccttccactcgtccgcacggtacgtcttcatgggagtcattttattccttacagcttccttgtaaccacagccctaaatccatgataaagctactcttgtactcctcatgtgtggttttggtgtccgtcgtctataaaatgtgactctcttacctacttgtcaggaggccagcagcagaaccagatagctgtttgggctccaggatgtattcgttcctttgaaatttgcgctatgcctcctatgtgggcaacgaacctgcagagatcatctatgatgtgctccgtactcgggtgactgcaatgcagatacatccagtgcagcgggtctggtgccgatgcatcgatttgca

SEQ ID NO: 2035 - DNA, 4001 bp, Homo sapiens
cactcctacccccatctgccactactgtcttgatgtgtccttccctcctaaggacagtggagcattacctgctgggagatggcaaatccgatgacaacctcatcctccagaacatcccagctcaccactgcagagttggccttgaggtgcctgacggtgacgttcactggggctgagggactgtctgggggacggggaggcacctaagcctgagcatcccctattgtgaggcccagacccactgtctcataagtaagaaggggaaacctggggaaggccatgcaggaggggaaggaagaaactaaggcctcaagtggggtccagtgacatggctctcagctcttcagtgggttgaagaaccaagcccaagaggccccaggctcctcatgactgggacggaagcccctgctggccacaggccggccccatgaggggtccaaggctcaaagtgatgggcctgggccggggccctatctaagggatgggtggttagagttgtggagagagttatgtaggggacataggtggacagaaactgaaggttagctgatgaaaagcagacaaaaggactccccagtccagtgctcttttgacaatactgccctgtccaatgagtgaccttgcgcgaaggagaaagacccagagatcgagaagtgtcaggctggggtgagccctggactgggagtgaggagaacagaagtatcctcagagctgtggtggcccaggcagaataaagcctgcggaagagtctgtgtgagcctcttatccatgctcttccagccccaagatgcaggtggggaggtggcaggggaagatggggtcactcagagcagggcccctccatggcgagtggagaggagagaacaggtaggggaagaggatgaatgaggaatcactccagaagagacaggagggaagtgggggtgagagtgatagggatagtgggggtcagtgaggaaaaccgtccaggagaggggcagtgcagtcacataaggctcagtatcttccaaggggcaggtgcagcacggggcagagctgcgcctgagcagcacccctcaccccacagagagtgaacttgagacccagggggctgggcctgggacctgagggagacagagccagacatggagggggaggtggagagacaggacacagacaggtggtggcagacacagaaccagaggacagagaagtggggcatctgagaaagacagctgcgagagagcgctccccgagccacggagggagagatgagccgggcagcggcagccaggagggacaaagacagagtggcaggagaggctgggcaaggacgggccggccccatggggcaggccagacactgtaccagatcaggggtgccggggcccaccccacgccctgcgccctcaggtgccagcccccatccccttcacacgtgctcctgcacagcgggaccccatctgcccctgcagagttggcttgcagggctttgagaggtcctggggacacagagagaggcccaggtgggggaactggtgtcctcagctgctccctgggtcaaagaagggagctagggaagctgaggcaaagacctggggttaggggaatgggattaggggactggggaccacaagaccctaggaaacccagggctgaggtgacaggggagatttggaaactgaaggacaggtctgggggtcaaggaggtaggaagacgctgggggctgggttaggggagcagtgtttgggccgagacaggagtccctagggggcagagaaaggaccaggggactcccaggtagctgggctcgagaggagcctgccccggcgccggccccccgccccgggcccccttacccgcctgcaccagcgcgaagcagacgcagcccagccacaggcggagcgcggcgcgggcgcggggcggccaggcgctcggcgacccggggtgtatggtggctcctccggccggcaggcccggggcggcgcagggggacgcggctccggcgcccggcggccgctcgcgctcgcgctccggcccccggcccggccggcccggccgctccggccgccctgcgccgccccgagccgcctgcatgtcggctccgcggacagcgactcccgcgcggcggcggtggcggcggccgcgtccacgtcgggcgcccggggggcggggcgcccccgctgcggggagaggtgcgggggcggggtgaggaccggagggcgcccccactcccgcccccgctgcctattaggtcctctgccggggaggaaggggcttcgcggacccacggctcccgccctctcaccgagcgggagcccagcggggttctccgcgcccccgccgcggtcactctctctcccgtgcacagccctgacttggctgccgctttctgccctttcccagggtagagagaggacaagtgccaccgagatgcccgtttgtgcccccacccctaagcgcgcctcccttccctgggcctagggatcccctcattccacggtagacccgaggccttgcggctggggcagacgggagcagaggggagagatcacagtaaggctggggtgagcagagagtgctaagtggacactagggctccgtgtttccagtggggttgggaagaggctgctctgtctcactggagagtccagctctgtgaccccaggccagtccttttccttcattttcatccccatagtgagggcagtaatgagcgtctaccaggggccagatactatgctgagctttctttgcattatgtggcttaattctcagggcaaccctgtaaagtcatactctgcacactttgcacaggaggagcctgcagcttggacaggctacttgacttgtccagggacccgcagcagagccaggatttgaacacaggctgatctgactcccaaagctgtgcttaactgaactgtctccccacccagagtgacttcacccatccggagattcgtgagactctagaattggccggggccagctcctccccagccagaaaacagtctgcagcaatctctaagagcatctctgagaaggggagtggctccagcccccttccctcatctcagccagagaaacaaggtggaggagagaggcatggaccagggctcagggccttttgtctcagcaagaacccctgagccccctcccacgactatccgaaattccactactagcggggcattcctttgggtcttaaaggttttccagaagccctggaagggctaattttctttggaaaggagacgtcttgcaaagttctgccacagaaacgtcttcagggtcttcctctccatccccctggttttacattaaggaagtgaggtctaccgatgggaagagcttggtgcagattcacacagtgggtcaagaggagcgatagacaaccctcctctccttatgcccacccaggactccttcgctggccctgtgttcctccttggtcaccttggaaggggtgagatggaagcgagcttaggggctcttgttgagcagcagaattttcctgcccatcccctcagtgcccccagacctgccccactcggcagggtgacactgcccagccctatcatttcccccgccacataccttgtcctgggagagcctcagctgggacctcgacccgtttgggagaagagccccggagccagagcacctctctctctcttttctctttgctctctttctctttctctccccttattatcttctctctctttctccccgcagctgctgcctgccccaccccacccggccccgccccaccagctgcagcttagcccctagggaccccccaccccccatccatcagacaggaagacaaccaggaggcccgcaggagcaactggagcctcttcaggcctccagcacaggaaccagcaggaaggagagggttcagttagaggacacagaatctactcccgtccctgcaggggagaaaaggagggagggtcctggtggggtcttggcctccagtccagcgctggggaaaggggaaccttggcgccat

SEQ ID NO: 2036 - DNA, 4001 bp, Homo sapiens
gtcaaggaggtaggaagacgctgggggctgggttaggggagcagtgtttgggccgagacaggagtccctagggggcagagaaaggaccaggggactcccaggtagctgggctcgagaggagcctgccccggcgccggccccccgccccgggcccccttacccgcctgcaccagcgcgaagcagacgcagcccagccacaggcggagcgcggcgcgggcgcggggcggccaggcgctcggcgacccggggtgtatggtggctcctccggccggcaggcccggggcggcgcagggggacgcggctccggcgcccggcggccgctcgcgctcgcgctccggcccccggcccggccggcccggccgctccggccgccctgcgccgccccgagccgcctgcatgtcggctccgcggacagcgactcccgcgcggcggcggtggcggcggccgcgtccacgtcgggcgcccggggggcggggcgcccccgctgcggggagaggtgcgggggcggggtgaggaccggagggcgcccccactcccgcccccgctgcctattaggtcctctgccggggaggaaggggcttcgcggacccacggctcccgccctctcaccgagcgggagcccagcggggttctccgcgcccccgccgcggtcactctctctcccgtgcacagccctgacttggctgccgctttctgccctttcccagggtagagagaggacaagtgccaccgagatgcccgtttgtgcccccacccctaagcgcgcctcccttccctgggcctagggatcccctcattccacggtagacccgaggccttgcggctggggcagacgggagcagaggggagagatcacagtaaggctggggtgagcagagagtgctaagtggacactagggctccgtgtttccagtggggttgggaagaggctgctctgtctcactggagagtccagctctgtgaccccaggccagtccttttccttcattttcatccccatagtgagggcagtaatgagcgtctaccaggggccagatactatgctgagctttctttgcattatgtggcttaattctcagggcaaccctgtaaagtcatactctgcacactttgcacaggaggagcctgcagcttggacaggctacttgacttgtccagggacccgcagcagagccaggatttgaacacaggctgatctgactcccaaagctgtgcttaactgaactgtctccccacccagagtgacttcacccatccggagattcgtgagactctagaattggccggggccagctcctccccagccagaaaacagtctgcagcaatctctaagagcatctctgagaaggggagtggctccagcccccttccctcatctcagccagagaaacaaggtggaggagagaggcatggaccagggctcagggccttttgtctcagcaagaacccctgagccccctcccacgactatccgaaattccactactagcggggcattcctttgggtcttaaaggttttccagaagccctggaagggctaattttctttggaaaggagacgtcttgcaaagttctgccacagaaacgtcttcagggtcttcctctccatccccctggttttacattaaggaagtgaggtctaccgatgggaagagcttggtgcagattcacacagtgggtcaagaggagcgatagacaaccctcctctccttatgcccacccaggactccttcgctggccctgtgttcctccttggtcaccttggaaggggtgagatggaagcgagcttaggggctcttgttgagcagcagaattttcctgcccatcccctcagtgcccccagacctgccccactcggcagggtgacactgcccagccctatcatttcccccgccacataccttgtcctgggagagcctcagctgggacctcgacccgtttgggagaagagccccggagccagagcacctctctctctcttttctctttgctctctttctctttctctccccttattatcttctctctctttctccccgcagctgctgcctgccccaccccacccggccccgccccaccagctgcagcttagcccctagggaccccccaccccccatccatcagacaggaagacaaccaggaggcccgcaggagcaactggagcctcttcaggcctccagcacaggaaccagcaggaaggagagggttcagttagaggacacagaatctactcccgtccctgcaggggagaaaaggagggagggtcctggtggggtcttggcctccagtccagcgctggggaaaggggaaccttggcgccatctgctggcctctttgggtaaaacctagatagatgtagggcattgggagggaggagatggcagtgcctgagggcttgagagagaaggcggctgaaggagggggcttggaggatttggagagttgtgactgtgggggtacagccttctcagtcctcatgatgcatggggtgcttgggccttaattctggggaaagccctggtgcctggaatctggcagccagtgagagctggctgggaggatttagtggagccctgggtgaacttgggagggagctgtcagaagcagccactgcaggccagggcgctggctcacgcctgtaatcccagcactgtgggagtccgaggtgggtggatcacctgaggtcaggagttcgagaccagcctggccaacatggtgaaaccccgtctctactaaaaatacaaaattagccgggcatggtggtgtgtgcctgtaatcccagctactctggaggctgaggcatgagaatcatttgaacctgggatgcagaggtttcagtgagctgagcacaccactgcattccagcctgggtgacagagaaagactccatctcaaaaaaacccagccactttatgtaccccatcccttagcgcaaggcttacgatgcagttggggctcattaaatgattgttgactgtatggaaaaaaaatcattcttccatcatatgtttattgagcacctattatggaccaggccctgtgtaatattctggaaacacagcagtgaaagaatgagtgaaaccatgaggacctgggtagggactaagggtgcgcctctgtcctcccaagctgcactcactgggcttcatttggaggactccacagagacccccttgagggctggccggtcacttacacattgacacctaatggggtcaccagcatttggaccctcctgcgtgtccagagtctcagcacctaactcaggctgcaggtgcccaagccagccccgggtacccatttagaataggaagtttcctttttatagcctaggatggtcatggccccagtcaaggatggtcactagacacccctcacccgccctgcaaatcacaggaagaatcaggaggtcaggagttgctttggggatataataattgagcacctactttatccatgttattgttttattttattttgagacggagtttcattcttttgcccaggctggagtgcagtggcgtgatcttggcttgctgcaatctctgctccccaggttcaagtgattgtcctgcctcagcctcctgagtagctgggactacaggtgcccaccaccatgcctggctaatttttttatttttagtagagacggggtttcatcatgttggccaggctggtctcgaactcctgatctcaggtgatccacccacctcagcctcctaaagtgctgggattacaggcgtgagccaccgcgcccggactttatccatgttattttgagtcttaggctggtatgtgtcattaacttccattccatatcaggaagctgaggatcagagaggtaaggggacttgccctgtgtcacacagccagtgaactatagagacatgtctcaaattaaattatgcggctgcaagttgagggcttgatccagtctgcctaccgtatcccctcacctctaaggacctctgaggacaaggatccagggctcagggctcacc

SEQ ID NO: 2037 - DNA, 4001 bp, Homo sapiens
gcttctggcggcgcaggtagcagccgttctcgaacatgttgcccgagtcagggtgcagggtccagaaggagcccttgccgggcttgtcgggcgagcggggcaccttcaggaaacagtcgttgaaggagagcgagtggcggatggagttctgccagcgctgctggttctgccggtagaaggggaagaggtccatgatccactggtagatctcgctcagcgtcagcatcttgttggggctctgctggatggccatggtgatgagcgagatgtacgagtagggcggctttgcgtgcgtgtagctgcgcctgtaggtcttggggtcgcgggcgcggctcaggcccgcctgcccgtacatggggctcatggagttcatgttggcgtagggggccaggccgcccatggccccggccgcctgccccccgagcgggctcaggctgggactcaagtgcggccccatgcccgccacgccggccgccccggccgagccgcccatgcccgccatggcgcccgcgccgggggacatccccgccagggacgggctcatgccagcgcccacgtacgacgacatgttcatggagcccgcgctcatgttgcccgagccgctgcccatggcggccgccgacatgctcatgtacgtgttcatgccgttcatccccaggccggcgttcatgttgctcacggaggagtagccctgcggacagagccccgggagggaggcgacagcgttagcaccgcggctggagggtgcccagacctcccacccaccgcccaggcctccgcgtccggggaggcctccggggagccctttcgtccccgatggcccagtctccggactccgagtctgtttcattcagggagagtcatgatcgatcgcccttgggaaggtggcgagcggattgctgcttgggcatgtggcccgttcctagcccttctccacctcgcccagattctagaacaggggtcccatggagtactcccaagccagcaccccaaatacattcccctaccccagagtctccccaaactctcccaccagcatactgagctggcgccgaggcccgaagtccccggacgccacctccggtcgcagcaagcaacctgcgggacaacgcgcggggcgcctcgggctgcctccagcgaagactgtcccgggccccctctgtccggtctccctccagggaccccctcccttgtcccagggaaactgcaaggcagtgcctgtgcggagtgcgggggcggctggaggcactgaacggggcaatagggaaagaaccgagacctgaaccacacgcggctgagctttgcaggcaaaaactttctttctctttgtccactagtctttgactctgcctccacttcagcccccaactcctacccatcttctcctcctcagctccccaccccctcgccggccgacctcccacccctccccagccgcgcgctgccaaacataactctgttaggatagtgcgtggctcggccacgaagaggatttggaggcgccgcaagtcaatatttgatcacaaagttaatattatctcaaggctaacagtgtgtcgtataaaaaagagacccatttgattccaaggagggcggaaaaggcggctgcccagaaaggctggggttgtggggcggggtgggggggtgccagcgagggaagcggtcctgaggttggggaaggagcgagcgccgccgctccacttccccctggaaaagacgagcgcttacctcgggctctgcatagtagctgctccagtcggacggctcgtgcccttccatcttcaccgctcccagcatactggaagccgagtgcatggcagtttaaaatttaacagccacaacaaacgaccagcaatcaccccccacccccaccctcttttaaaaaaaagtcagccaaagcaccgtcccctcctccctccctctctcgcgctccctctccctgggctccactccctctctctccctgggcaggccggaggcggtagttggaagtgggcgggaggtgggggggggcgaggagcggaggaggcccaggccagcgccccgcggtagggagcacccgccgccgccgcgctcacgggctgccgggtggcggctgaggttggcagtgccgagctgccccgaggcggcgggaagcgcgcggcgcgggggctagtgggggggtggggaggaggaggaggaaggaggaggaggaggcggtggtggtggtggaggaggaggaggaggaggaggaggaggaggaggaggaggaggtgtggaccgcggagcggacaagtgccgcagtgacgtgggaggctggtgatatagcgcggcgcgctggcgcgggcctccaatccccagacccggggcagcccatttgaataatcagctcacacctaggtgagaggtagccgcagccggcgctccgcacctgcccctcagcgcctgccgtccgccccaccgccgcggcgccccgcactcctgggcgggccaggggagcgggctgggcgggcgatcgggcacgcgggatccctggtcgagccccctttcctcccgggtccacagcgagtcccctgaggaaggagggacctgggaggaaaccaccctctggggcggctccggcctccagcccccgccccgtctcatcgcgccgggcgcccggtgcgcctgtcggagggcgcgtccagcctcagtgcccggcagatccctatgaaagccggatttatttatgccgggtttcttcgctctcagtgctcattctctgtcaaaacagcaagtccatgacagccaatttgcaaagcgctgtcctatttagaaaaactacgtacacacctttaactcgcccgctgctgctcctgcgaggcccctccctgttacagttcagacccggaacggcctcgggagaagcgcggggcgcacggtctggccgcctcggctctccgactcctcagacaccggccgccagggacccgcagtggggcggccggcgcctggcgcaagcagcccctctagcagcggccgacggttgggaggctgagatttgtctctgatattcaggccggcgtgtttcaaggttacttttcagtcacaaccgaggtgcccacagcatttcgtaactaaaacaaacagggcaggaggtggggagggaggggtgaggagagaagaatccaggaatcaatgatggggcatatggagttgacttcaagagcgtctctgtcctctctgtcttccagagggactgcttaatagaaattagaaactccagcaatcgtatacttttatttccccagcagctcttgggttcaaaaattgtcttctgttctgggttagcctgtgagcccagatttggagtggggggatattgcaggtgtttggatgtggaggctctttcttggttctgaaaacctggctggaccttggggatccagccctgtacccaccccctcagacacagagaatgcataggaactagtgggcatccagcccacctgtccaaaattgggggcgatggtggcagaagacaggcgagatggcagacacggagcttcgcattgaagcttgagtaagggtgaggctggaaggcaagcgaggaggtagcagtaggcacaggggaaccacttccctaaccccaggactctcaggtctgcacggtttgggacacagaaggaagccgccggcagcatcttttgctgctgaaatgcagatggtttggacacttcataaagagggcattaataagcccgccgagtgagcgccagggcgggattctcccacaaattcaaggtctgtatctccgcggaagccgtgcctatcggtcccccgagtgctgaaggctcccacgaggggcaggccagcccggtgcgccagggaaggagcttgatggtgtgtacggctacgtagtgaacgtggaggtgtgcgcagcggagtcagaggggctagatccccagcatttcccacggggtcccacctagcgcgtggatgggagcaacttcatcactccaccgagggcagggaaagaggag

SEQ ID NO: 2038 - DNA, 4001 bp, Homo sapiens
cccctaccccagagtctccccaaactctcccaccagcatactgagctggcgccgaggcccgaagtccccggacgccacctccggtcgcagcaagcaacctgcgggacaacgcgcggggcgcctcgggctgcctccagcgaagactgtcccgggccccctctgtccggtctccctccagggaccccctcccttgtcccagggaaactgcaaggcagtgcctgtgcggagtgcgggggcggctggaggcactgaacggggcaatagggaaagaaccgagacctgaaccacacgcggctgagctttgcaggcaaaaactttctttctctttgtccactagtctttgactctgcctccacttcagcccccaactcctacccatcttctcctcctcagctccccaccccctcgccggccgacctcccacccctccccagccgcgcgctgccaaacataactctgttaggatagtgcgtggctcggccacgaagaggatttggaggcgccgcaagtcaatatttgatcacaaagttaatattatctcaaggctaacagtgtgtcgtataaaaaagagacccatttgattccaaggagggcggaaaaggcggctgcccagaaaggctggggttgtggggcggggtgggggggtgccagcgagggaagcggtcctgaggttggggaaggagcgagcgccgccgctccacttccccctggaaaagacgagcgcttacctcgggctctgcatagtagctgctccagtcggacggctcgtgcccttccatcttcaccgctcccagcatactggaagccgagtgcatggcagtttaaaatttaacagccacaacaaacgaccagcaatcaccccccacccccaccctcttttaaaaaaaagtcagccaaagcaccgtcccctcctccctccctctctcgcgctccctctccctgggctccactccctctctctccctgggcaggccggaggcggtagttggaagtgggcgggaggtgggggggggcgaggagcggaggaggcccaggccagcgccccgcggtagggagcacccgccgccgccgcgctcacgggctgccgggtggcggctgaggttggcagtgccgagctgccccgaggcggcgggaagcgcgcggcgcgggggctagtgggggggtggggaggaggaggaggaaggaggaggaggaggcggtggtggtggtggaggaggaggaggaggaggaggaggaggaggaggaggaggaggtgtggaccgcggagcggacaagtgccgcagtgacgtgggaggctggtgatatagcgcggcgcgctggcgcgggcctccaatccccagacccggggcagcccatttgaataatcagctcacacctaggtgagaggtagccgcagccggcgctccgcacctgcccctcagcgcctgccgtccgccccaccgccgcggcgccccgcactcctgggcgggccaggggagcgggctgggcgggcgatcgggcacgcgggatccctggtcgagccccctttcctcccgggtccacagcgagtcccctgaggaaggagggacctgggaggaaaccaccctctggggcggctccggcctccagcccccgccccgtctcatcgcgccgggcgcccggtgcgcctgtcggagggcgcgtccagcctcagtgcccggcagatccctatgaaagccggatttatttatgccgggtttcttcgctctcagtgctcattctctgtcaaaacagcaagtccatgacagccaatttgcaaagcgctgtcctatttagaaaaactacgtacacacctttaactcgcccgctgctgctcctgcgaggcccctccctgttacagttcagacccggaacggcctcgggagaagcgcggggcgcacggtctggccgcctcggctctccgactcctcagacaccggccgccagggacccgcagtggggcggccggcgcctggcgcaagcagcccctctagcagcggccgacggttgggaggctgagatttgtctctgatattcaggccggcgtgtttcaaggttacttttcagtcacaaccgaggtgcccacagcatttcgtaactaaaacaaacagggcaggaggtggggagggaggggtgaggagagaagaatccaggaatcaatgatggggcatatggagttgacttcaagagcgtctctgtcctctctgtcttccagagggactgcttaatagaaattagaaactccagcaatcgtatacttttatttccccagcagctcttgggttcaaaaattgtcttctgttctgggttagcctgtgagcccagatttggagtggggggatattgcaggtgtttggatgtggaggctctttcttggttctgaaaacctggctggaccttggggatccagccctgtacccaccccctcagacacagagaatgcataggaactagtgggcatccagcccacctgtccaaaattgggggcgatggtggcagaagacaggcgagatggcagacacggagcttcgcattgaagcttgagtaagggtgaggctggaaggcaagcgaggaggtagcagtaggcacaggggaaccacttccctaaccccaggactctcaggtctgcacggtttgggacacagaaggaagccgccggcagcatcttttgctgctgaaatgcagatggtttggacacttcataaagagggcattaataagcccgccgagtgagcgccagggcgggattctcccacaaattcaaggtctgtatctccgcggaagccgtgcctatcggtcccccgagtgctgaaggctcccacgaggggcaggccagcccggtgcgccagggaaggagcttgatggtgtgtacggctacgtagtgaacgtggaggtgtgcgcagcggagtcagaggggctagatccccagcatttcccacggggtcccacctagcgcgtggatgggagcaacttcatcactccaccgagggcagggaaagaggagtaagcattggagctcaaagaatgagcaatttttcaaagctttctccgcaggcctgggcagacacacacgcacacacacacacaccgcacccccaaaactcaaaagaatgttatggttgacctagtctgtgcgtgtgctgtatgagagtatttgtgagcttatgtgggtgcccacttccctttctattttgctcctgggtggaaatttggtcccagaaattattccaggaacagaaggagcgagctggagggccgcaggagaagggggcgctacacttccaaggagcggactttggaagcccccacctccaccacagcactattggtggccggggtcagggacaccagagagcgctcggcgggggcttccacagtgacagggcgccccctgtcggccgccaggcccgcgggaccgacccgagtcctcatttacccccgcgatcccaaccccgcagctccggcaccggagcaccttctcccccgctctcccagtctctccgaaaacgccttcggggggactcggcctttttggagccccaacccctaggttctgcgcgaacccaaaacggcctcctgcaccctggcgaggttctgggagctccggtagggtagggctggatgacgcctcctagagtctcggagcagccgctcccgcaccctcccggcacgcctgcccatgggaatgcgagcggggtctacggttagctttaggtagctgggagcgggacaccaacgggctgcgaaggaagcagggacgttcagacagcctggggttcgcgttcccttccagctcagcggtctttggagctcctccttcccggagttctgatttctaaagggctatccagagttctggctcaggcttgaatgctgaagattgctcccggagtttctctccaggaaaaagttcgcggggacctcgggctgcagatgtttctcccaatccctctttagtctaccctcatgtagggccgagacctacagagcccttccctttccat

SEQ ID NO: 2039 - DNA, 4001 bp, Homo sapiens
ctctatagtaaatggaaaaaatgaagccataaaagagactagaagccaacataggtgaacatttatctcattttcaagtaggaaaggactttctaagcacaaaaccagagacagaagccacagaaaaaaagactaacctatttgactgtataaaaccatcataagcatcacaaaaaacaccataaacaaatagaaaaaaagcaaatgatgaattggggaaaatatttgctatatatgtaatggctgatgaaaggttaataaccattccaaataaagagctgtggcaaatcaataagggaaaaataagatgaacaccctattaggagtaaggacatgaccagacaaccaaaaaaaaaaaaaaaaaagcatgaatggccaatgaatagtaaaagtaatcacaagatgcaaatttcaacaatgtgataatgtgtttttcttacctgtcatgttgggaaataattaaaacataataatactcacctagggttagcttaagtagagggagcataaaataggacaaccttttggaaggagaattagcagagagggtcataaactttaaaaatgcacgccccctttgccccagcaactcccttttcaggaatccaaggaagcagtcagggatgtttatagaaaaaaacgagaaacaaccggaatgtccaacaatcggcacttggtcaaatcaatcaaagttcatgctgatgtgaggacagtcttgtccatcatgaaagatcatgtgttcaaacaatttttagtaagcttcaaaaacactactgttaattgaataaagcaggaacaaaaccaatatatagcatgattctaatttggttacagaaatactaatagctaacacttcgtgagcacttactttgtgccaaacgctgtgctaagcctgcagaatcgagctcaccccagccctgaacaacctgtttgcttcctgaatatggactctggtcacacacatgcagtcctggggtaggtccacacagctaaactacggttgacaatggtgtgaagtgctccctgcccccccgccccaagggtctcctctaaagcgatacaagcaaagttcagttaagtgctcagcttgccccggcaccttgcaatcctcctgctactagggtgaacagaactgatgctcactctcataaaatgtaaaggtcctcggcgacattactattattaaacgccagctgtgtacaaagctctaggctggatgctggctgggaaggcaggtgggggaaggcaagaaaagagagcgggagagatggaggaaaggagatcgatggagtgtggtcaagatggaggagacagagataggggagatggtcagaggccaggagagatgcggggaaagagagtctgagtgtagcgacagacagatggcgggagaaagagaggcagagaaacatgtaaaagagcaagacagggtgagcagagagacagagaaggatgagaggcatcaagagctaagagacaaagagatgagagagatgcagttgaaattttcagttgcacctggacagcatttcaagttgttcaaagctctgaaatccataaagactggcagctgacatattttaaaaatcctatccatctacgtatcaattgatgaattcatttatttttgcccctgcccatgcattaagtacttcacctttaagtcttctgccatttattctattatttttttaaagaccttacctggctggaatcacggtagctgggtacatcccactgtaccagagggcccctgacccccccgccgtgcctacctccctgccatctcctccaatggggcccacatctggtaggggagagcagggacactcaccttggtgaagtggactgacagaaaaggatcagcctggcttgtgggaaactgtcacgtatcaaaaacaactttgcttttataccgagaagaaaaaccacgctgtacggtgtggaagccgcagacctctctcttctaataatccaaatttttttcgatgagtgtgtgcgctgataatcacggggtggggaggggttctcatagttttttttttctctctctctgtgtttctccttttcttgattatgagacttaaacggaaattttgaaattttgggtttttttctttgccctttacgagtcatctgaaaatatgatttcttcccctcaccacagaggtgagaggtatcaatgagataatagggctcatgagaaaccacagtttttaaaacaaaagtgtatagagtttgaaaaaaaaaaaacaagggaaaagaactaaaataaatcacagggccaacccgaggcaggcagagacaccattctgtgagtgagaggatatttgagggtctctggggaaagaaagagaatctgaagctctatgtgtggatgggaaatgccagggaaagagacagaatagggctgggttcccagaggcctcgccctactccaggcctcagtttccctatagatggaattgatatggtccccattgcttgaactacccggcgaggggagttctgcaccccctgcaacacccctcccacagagggtgaggggcatgtaagttacttcatggaggagaaagcggagagcccactgtcatcccctaaaattcatggacttgaagagtcggagaatccctggctcccagaatctactgacagttactgaatgaggaaagagagaaaagtctcgcctcatcacgttttagggcttgagtgccctgacccagccactgtcccactgggaaggtccctagcaggtccccaatattaatgcatccatcctcacgatgaaccccagaggcccattgggaccctgaccctcttgtttcaggaacatcatggcctgatgcttctgaggccctcagcctttggggtcttttacttcaaaaagccccagtttccaaggatttaggattccaaatatccgccatcatctcagtagctgatgtttatcttgaattttccatgggtcagatacagtgctgaacatgtctcacaagtgatcatgttcaatcctcaccatggccccttgagctccatctcatcattattgtattcctgttatacagatgagggaaacggaggtataagtagtcaagcaacttgcccaagatcacagagctggcgagtgtgggtcccgctttctttggtgctgggctttgaaatccccaagctttcctgaacttgatgttctcaggttttaaattctaggatgtgatggcagggagatcctgggatttggagagtccttggagacttgaagcttgtgaggcttttaggttgtccaggaattggcggctgcatctcttgacctcagcaggcactctattcaaccactggtcagcatggtagaccagcccccaggggcttctcctgacaggccatggtgaagacttccagctcccagcaccctgcaaagcccagggttctagtcgtccaacaaccactccagccctctacaagactggcttcagacctggggaagagaaattggaaagggctttttatttacatggtacaaatctggtggccaagatccaccccttcacccctttgccccctttcctcccccaaccttctaagccctcgtaaaaaggagggcctctttcctcaactcagactcacccttctggaaaagcccagaatgggcctgatggcctggctttgtgaagacaagaaaaaaaaaaaaaaagaatagaaaaaaaaagaccttaaaaaaatcagccaacaacaattaaaaaaaaaaaaaaacacccaaccctccccaccattagttcaaaacaaaactttcgctggttgaggcttctgagttggtgggacacatctgagacccaaaaatggcttgggtgtgttggacagccaggggaggcaccaaggtgggatgaggtcccctgcttggaggcctgcagggaccctgtgaacagcaggtgtttaacagatgtcacggcatgtgggagggagcaagggagggggtgaggagcatgcatgtcaggaaggagtcctgg

SEQ ID NO: 2040 - DNA, 4001 bp, Homo sapiens
tctttctggttccagagctggaggtggtcttgtctttgggactcccagttcaggggcttggcctctgcctcaggagcacacagttcctgggcttggaaaaagtgatgggggcggggagcagcccagggcagggcagtggtcctcgtggggccacacaacactccacctagtgcagcagcagcttgtttgctatctctggtgtgtttttgccttgcgctcctggcgtggtcctcagacaggcctaaaagccgtccagccagcaggcctgggggaatgaagcctgttttgtagaagatacagaagccaggataggggaggtgacatgcccaaggtcacacgtgactggacggcaggggcaggtgagcacctgctgagctgacaacaagcagtgcccagcagctgcctcctcaccctagctgagctgaccacaagattccagacctcagctggagctgcagcctcatactggctgagtggctccaagacacagaaggaagcagggtggcaggctgacctcagccagctgcctgccccctctcctctgaggctggcctgggaccgatggggctcttccctccaggaggggtttccgggcctcctcttttcccctacctccctgtggagaactgtccacccctccagatatgctccagtgatgtcggaggggatgcctcaatctggcgagacgcagcggcaacaaaatctgctcagagacaaacggacatgttgctgatatgaatctcacttggtgagtggcaacaacagagtcctgcatttgggtctgtgcagtcgtgcacaccagagaccgctgacccccgcccgcagcacagggaactgcatatatacacagcaggtacaaatatgggcacacgacaaaacgcccatacaggataaagatgcaggaagaacagggcactccaacaggtccgcatgcacaaacgcatgtgctctatgacccgcacacacagcacacatgtacaaacatccacagacacaagtacacacacatacacacttacatacataagcaagatcaacacgggcaactcctaagacacaaacacagacccactcaatgaatacaaaggaaaatagacccagaactcacacacagagacaaatgaacacacatatgcaaatgggttcctgaaggcatcaccccacccatacaacctacatggaaactcactatcacacacgaacgcacacacaacacacacagtgctgagttggcttcgtagttagcaaaacttccctgagagctccattttccctaagtgccaatttcatttccctaggaaagtcccaaagacaccgagaaatgcggttatgtctccaaccaccatctccagggatacaacatcccttgccgtctctctgaacctaggcccaaggggttcacgaaggggccgtgctgggctgaatcgctggagctgggcaccaagggggagctcaccatcacgtcactgtgccaagcgccaagcagagccactgtgaggcagtgaggactggaagggcctgggaggaatagccgggatcgacttttgctggaaattggcccttgcaggcctcccttcacccagaatgcctgtgatcactgtgcctgggcacatgggcttcacttggcaacacctgtgctggcctgtaggaccaacctaccattttgtatcattctcctcccaccccaaagttgagtgccaaagatctgctcctggacccaggcacacctgcccccactggcacacctgggcacatctgcccccacctaccattgcccatcgtcaacacctgcacattctcaaattccagggtggtgtaggctgggtccagtgcagcactgtagtcggccatgtccatgtcgacgagggttttggagagtcgcattctccctgcctccacgccgcggccacctgccctaccctgggcgcccaccccgaaggcccccgccctccgccctcccactgcctcctcccagtgccctctctgccttcctttcaaaccgtcctctgggaagatctgctgggagtcttggcctagcctctgtgaaggggtggaggctctgccggggaggggtgggggttaatggttaatcggtcccccgccggtggataggctgggcggggctgcagggatttggctgtttgttggtttctggctgacacccggggtgctaattacaactgctggggccctaactcaccgatgttcagttatcaattgtacaaggcaggcatcatgactcacgggcactcatttgacccttgactcacccacccctccaagccattgtcaccccaagtcaggcattctaactgatactatcaggcactgacagcctacctccgagatcccctaattcaataacttcccaaatcattgacttctaccctcaatgcttttgcagagataaggctgccccatggcccacgatttagaaacctaaatcccaggccccagatgccaatcttctggatccttgttctgggagctcccttccagttcccccgcagtttcccggttcccctgggagcagaatggactggaagtttgggagggccagattcacctccaattccccgctcctgctccctgtgatcccaccctgcccctctccgtctcccacagctcccagtgtttctggcccaggctggctccatctcggattttcccatcacattctcctgtttccctcacccccaccccctcccggagcaggcagagacctggatttacattcaggcacctaccgtctactaactgggaccttgggtaaatgattctcctctccgagcctcagtttccttttctgtaaaatgtacaatcaacttcaaagggtggtttgagaaggaaatgagatggcataaatcaagcaccaagtggggcctggtagacgtccatcctcttccccctcctccctctccctgtttcgtatcccccttgccatccccctgtttctctccacccgtctcctaccttcagagtgggctttgtgggggtatcgccagtgcagtcacaggcaacccaacccttagaaagtcctggttcctggttcagtgctctgctgtggttgtcctaaaattcatcatgacttttgaacaagggattgtgcatttttgttttggacggggccctgaaaattacacagctggtcctggctgtctgaagctcatggtgcactctgttcttctcactccctccagccctcattgccttctgtgcagacattttcaagggctgccaatcaatctggggaagtaaagtcttgatgtagaaggcagagagtgagggcagaggaagaaaagcctgagacttgggaggcctgggagcctgtcctccactgctggctggaagggcaggttggagggcctcggtgacacctgtgagcaagagtgggcgaattagtgggagcaccaattaatgagtgagtgtgtgggggaattgatgagtgggtgaattaggagtgagtgaattagagacagggagaattaatgagtgagttgagtgaatgcatgaatgagtgagtgaatgaacgaatgagggtaaattactgagtaagtgagcaaatgggtgggtgaattaatgagtgaatgggtgggtgaattaatgagtgagtgaatgagtgaatgtgtgggtggattaatgagtgagcaaatcgggagtcagggcatgtgtgttcgagtggtatgaggaggcatcttcatgttctttccactgctagaagccctttctctgccctgcttagctttattctgtccacttgatctgacctctgaagctgagatgactggggagtgctattgcctgtagggaaaggggagagggagcaactgttgtggaggacaagagaggctagatttgatgtcaggagacctggggttaggaactagctcagtcactattccgataactttatttacatcgtctcttctcagggcttcaatttctccctctgtaaaatagaaagatgatcctggctcagttttctgttagccaggacaaga

SEQ ID NO: 2041 - DNA, 4001 bp, Homo sapiens
caatattatttatctcagacagccgtttggaaaatgaaacagctgtctgagagataatagtagaacattcactaacccattcatccatccattcacccacctacctgtcgatagaagcaaccattctaataattgctgaatgtttgctatataatgagtatgacacaggagcagagatgaagagacatgaggacatcctacaaggtgcagagacgtgggagacagtgaaaggctgtcaggttatattattgtatcatcctttaagagacactgtggggccttctgttcacccctagcttagccttatgacctgggctgtccttccccagaagctgtctggcccctttgagagacaatgtcttcccctagccacaggttcaaccaagtcatccattggcatctatactccaggtcttaaaattgtggattaagggtggcctcacccttaatctcctctatgctatctcctctaatctccccgctctctgggagataggtcctgttgttatcttcattttacagatgaggaaataggttcagagaggggaaatgtcttgcccaaggtcacacagctggtgtgtgggatgggttcccaggctgttggtttcttcagcctctgccatttccagtgcatcacatattcctgtttgatgggggtcaaagcaaagaagattcttcctgactagagtcaggagatcaggccctgattctgtcattccctggccctctgtcctcagcaattgatgacataaatgttgattgtgtctttgcaatgcacgtggtatcaagggctttacatccttgttccccacggcatccaccatgatcttaagacacatcctagtcctgtctccacttcagaaagaaagcaagaggcacgtgaatgttgagccgtgtgacagagtcacaactagaccccgaggtctgctggattccagagaccaagttctgtgcgggtgtgtgatttgaacaggtttataaaaggcacccaacttttaaaaaatccaaaatgtgtccccaaaagataaaacattctcttgaatttccctcctcagaaacaaacctgtcaccaattttattgtgtcattccacgaattttctatgcgtggaatgtacacgtatacgcgtgtgtacatatatacatctatatccgtttcgctatcagcaactacacagttcttcagtgtaccgttttcacttaatttaactgagaggttcttccctgtcacacacagatgtgcgttgtttccttgaacaatgggatagcattccactgtaaagacgtctcacgctttatttacccgtcttccctctgctgagggacattgggttgcttccaatgtgggggtcaccctaaggagtgagcctgagcctttcactctcagtaacacatgctttctagccctgcatctgagtttcacacgtccgcacaagatattctcattttccaacgctccaccctgcgcggcgctttctacctcctccccattatccagagccaacggaggtgcggagcgaccgagctgcccggtcccacgcccagcttgataatgcaccagcaacgtgacctaggcccagcaagcctctcctggtggacctcaatttgccccgcatcgaaacaggacggtgcttccaagccccaccctctgtggggttttggaaagacccctgagatgcattcccaggaaggcctctggacagacaaaatgagccaagcctctgccccagggcttctcggcccctcccagcacttctcgcaccaagcaggccatgccccggcttgagagcttagggaagcggtcacattgcctccgtggggcttcctgcccttccagaggagctccaggaggagctttgggcccgtaagaaacacacggggaggtgtcccatggcctcccaaagctgaccgcagtcccgccctgtccagtcttcccccagccccacttaccgtaagaactctccactggagccccgaggggcgcgttcacgctgaccatggccaagcccacccagccggagagctgggggcatggaggagcaggggcccgctcacagcagcagcacagccaccaggagcccgtccaccaggaaggcggtgagtgcggccagctgccaccgcccggttatcttattgattcttctaatcacccaaggtgggtggatacgttaaagagtaaccagtcacttagggaacccgcggctggggactgttgctgtctccatggcaatggcgacctggccagacctgaggtccactcgggtcctagtcctgcactctggggttaggggaacccagagccaggtgtatggggacatcagccccccaatttgaggacagggccggagcagaaggggctggagaggtgagagtccaacctgggttgggttttatggctccaaactatgggtgtgtcaccatgcaggaagtagtgggaaaaccgagggaggggcagaggaaaaaaggagggtggagaactgtgtttagtgagtgcctactggatgctgggagttgcatacaggcgttaccatatttaaattaaaccttgagatgaagggactgaaggacagagagaaattgcatgcctggagtctcactgctagtacatagaggtgttatcttcctttcatctaacatatttattgagcacctactatgtaccaggccttgtgctagactctggggatatggaaatgagcaaagtagatgtacccccgaaacttgtggactaatggaggagacggaccttaatcagatcgtcattcaaagatactattacaaactggtgagtgatatgaggggtggagaaacatggggctgcctccaggccaatgggacaaagtcatcctgtctggcgtctcctctggtctccttccccattctaaattcaacctgctgctgaaactcacacactctgttttagctccctggcatgttagacacctgccacctagctttttttttggaacagccccgtttcttttgtctcagttttggatctcaccacctgcttggggattctgaaatcaaggtcattcatcctgttagagagagctgaaatgagaacagtgaaacaaattctggactcagaaaaatcagaaaactccagctctattattttcttgctgtatgttttttagtaaattatttcatttccttataggaatacctagctcatagtttgccctgcttctaaaatagctaattgataatattcctcttctcttcccatagtctcttttttcagctttatcaatcacctcagagggaccttcagcccctacagatgggcatgggttgcattaaaatgtcctttcttttctaaaacaacagtgataacaaacgttagattttggggccgggtgcagtggctcacgcctgtaaccccagcattttgggaggccgaggcgcaccgatcacgaggtcaggagtttgaggccagcctgaccaacatggtgaaaccccgtctctaccaaaaataaaaaaattagccgggcatggtggcaaacgggaggctgaggcaagagaatcgtttgaaccagggggacagaggttgcagtgagccaagatcgtgccactgcactccagcctgggcaacagagagagactccatctcaaaataaataaataaataaataaataaataaataaataaataacttcgatattttttaaaaaaaagtattaatattcttggtcgggtgtagtggctcatgcctgtaatcccagcagtttgggaggctgaggcaggtggatcacttgaggtcaggagtttgagaccaggctggccaacacggtgtaatcccatctctactaaaaatacaaaaattagctgggtgtggcagcgagcacctgtaatctcagctactcgggaggctgaaggaggagaatcgtttcaacctaggaggcaaatgttgcagtgagccaagattgcactactgcactgcagccttggcgacagagccagactccatctcagaaaaaaaaaaagtattaatatttt

SEQ ID NO: 2042 - DNA, 4001 bp, Homo sapiens
tgctgcagcccgcctgtgagagacattctgagcagaggaggcttcctcggggagggccccggggacacggctgaggaggagcagctgttcctcagtgtgcacgatgccgtgcagacagcacgagcccgccacagggagctggaggccaccgatgcccatctgtagcagggccaggcctgcccagcagcctctgctccctcctggggacccacagcagacgtctgcaagccactgctgagacccttcccagggaggagccacccaagagctgcactcttgtgccacagctgccctggggaaaccggggaaccccaactgggaaaggaggccctctgatcacacgcaggacccaaacactcagaaatcaagaacctctgcctccgagacaggctggcccacagtgctggctgggccccaatgcaccgtccctcagctcaggagggatgggcctgacctgacgctcagggttgacatcttatttgaacaagggtcccccgccatcatgcagcctccaaggtgccaagaggactccctatgcccaggcctgcccggtgcccaccctgctggtaggagccagcggctctggccaagtgcacgagggtctctgtgtttccagaaggccccacacacccaagtgcccctcacacctcgtgcctccccctcacagggtggccacctgcaccagcgtcagggcccagggtgctgtgaccgatgagacctcagctcagccctcaggtgcagtggccctacccagcctggccagcagacacacacagggatgctcacgggtgcaccaggagccaggtgcggcgcagccaaccctgagcctgcagggagacctgcaggaagcccaccgtgccccatgcaggggctccctccagcacacagccctcaccccagcacagccagcaaggacacgctctccccaacagggtgcttcggcgggaggtgggggaacaaggggtcttccgagcagcccccagccctcccctcccatctgtgcctctgtaaggggctctgggacgcccagaccctgcccgccgcccacctggtggtgacaagctccagcagccagtgggtccggacctgcttgatgccgcggtgagggacggcgcccacataggcgaggttgagctgctggtcccagctgaggacgtactggtcagcctggctgtgtggcagcggggggctggggacaacaaaggggcggctcagtcccgagcctcagcatggctggcagcgcggctgacacacacgttcaagcccaggactgcccgggcgcaggatccaggcgctgcccgtgcgttcagtgactaataaaatgacccttagggccaggaatgtggggaggtcccatcttcatggggaacggcagcagcagtaagacgaggggccaacgccagccctggccctggccctgccaggaaggcgggtacctcagctctaggtggaaggaatgggacaggcaggccaggtcccgctgcagggccgtccactcccaggggagactcctggtttacctcaaagagcaggatcccgggcatcggcctgggctgcagggggcggcccaggctcacgccccggcgcccactcaggtggaggacccacccacaaacacggcggggggcgggcccgggagagccagggccccagaggagggagctccggtctctgaagctctcacagtgcgcagtcagggggcgcccgagctctccccgtgcggccagggggtcccggaggccgcggagcgctcaccagaagcctgtgctcctccagaagcgccgcaggggccacagcgcgcgggccgcgtccacatgcaccaggtgcggggcctcggccggggccaccgggggcgcggccaggagcgaggccaggagcgccagcagcgcggcgcgggggcgcaggggacgcatggccacgcgtgctcggggactgcggggcttcgggctgcactgccggttccgcctccgggtcggagtctgggcgcgcaccccatgtgaccgccgccgcggggcggggccttggtgagggggcgatggccgggtgggaggggttgggtggcctcggggagcctcggggagccgggagcacggcagggcttggagccccgcttccttgcgggcctcaggggctgctctgaggaccgatgactcggaaagcgctcagaagaacgcttcgcccgttggtgctatgtgagttgagccattactgtcttgtttttctctgtttttgtgtgtttttgagacagagtcttgctttgtcgcccaggctgaggtgcagtggcgcgatctcagctcactgcaacctccatctccggggcttcagcgattttctcaccccagcctcctgagtaaagcgtgcgctttagcaggaaggagaattaccccagaagagcacactgggccctccttacacttggcttcagatccatggattcaaccaagcagactgaaaatattgttttaaagccaaagcaatacgaaataatacatattttaaaacaatacagtataacagctatttacagagcatttacattgttttagggactataagtaatcttgatttaaactacacagtaggatgtgcgtaggtaatgtgcaaatactgtgccattttatatcaagtacttgagcacctgcaaattttggtatctgggagggtcctggaaccaataccccgaggataccatgggacaactgtagtacatgtgtagtccatgtatgcatgtgtgaatccaagcaaacattgtataaaaataataatggaaagaacaggcttggtgcggtggctcacacctgcaatcccagcactttggaattgcaggccaacacgggaggatcacttgaggcctggagtttgaaatcggcctgggagatgtaccaagaccccatctgtacaaaaaaaaaatttagccagatgcgatggtatatgcctgtgaggcccagctacccacgaaattgaggtgggagattgcttgagcttaggagttcaaggctgagacgggccatgatcacaccactacattccagcctggttgacaaaatgagaccccatctctaaaaaaagaaaagaaaaaaagaacagtctactaacaaaacgaaaatactggacaataatcctctctaagttgggagaaggataattagagttacagtgttctgggtctttttattttggggagaggggttaaaatattgcttaacattaggtcttcttatgttgaaattgcattaaaagtgattagccatttaaaagtgaaatagtgtgtatatattccaaattagcaaggaggaaaaacataatacaaaaaaattcattaagaaactaaaaagtaagaaagggagggaaaggcgagagaaaccatgcaagtacagaactgtctccaggaacagcggggtaagaccctcagtccaacgaccccagagaaaacaactaaaatgatggataactcgctttaaaaacaattcctcaaagcgtcagagaactgagaaaaacagtaagaaaccaccagtcccacaccgtggtgcaggacacagcaatggaaactgaattgtttcagaccagccgcctcctgagagcaaccatcagaactggagagcgctgaacggaaccgtccagggcactgggagctctgaggagcctctgaggcctcggggctctgcagggacaagccgggagggggcggggcccgctttggggcggcgactccacacccctgcagcgtatcccagccacacaagacatggcgacacgctgctgcgttcgttcctcacactgtggccacaggacagaagtcgaggctcaggcggggggcctggtaaagactttgggtttttcttgggaccccaaagttctatcccctaaaagcaaaggtaaaccagcaacagaattgtctttgtggggactgaagccagccttaaatcacctcaagccctgagagaattaaggtgagccgctcaccgggacacctgtggacagaaaagtacaccttccctgga

SEQ ID NO: 2043 - DNA, 4001 bp, Homo sapiens
ggctttgcaaagtcacccaaacacgaatggaaatagtaaggtagagtttcagccatgagttgagttcatagctttagcaactgttaaatagctaatgtctactttctggagaataaatgctttgcaagaccctcggcaatgaaaccaaagaaagaatttaaatagcctcaccgaataattagtcagcttttcgaagtcatctcgtttctttttgttgctattgaaaaacttgacattcatgtcttccttgatggtctccacactcttttggatgctctggtcatctttaaagtttttaaaaagtttgaagtaaaaggagacaatttggctctgcattatttttctgtcactctccttggaaggaaagagcacaaacagaggatgatgtgaatttatccatcagaaagcaagcaacaggaaaattagccaaatgggaatattcagcttacctctttccaattcttcaaaatgcctaagaaaagagttccattatccgctacatctgaatgacctgcattctaaaaaaaaaaaaagaaaaaattggtttacaattagcccataaattgccttaaaaatatatttcaagtttcattgaactcagatgtgacaatattcactgatttccttttcaactcttctgcttagttctaacaataagtattcccaaaaggcttatgtgagatatagacaaagactattatgttcttttagcttttttatttcccaatataaccattaaattgcaatgtcacaaatgagctcaacaaagctgatactccaaaggtcccaaaaactatagtaagctaaagaaagtattttcaagctaggctaaaaaatacaaaaacaaaaaacagcaaagccaccccactataaaatactgccccccaatggtacaggtttctattacatctactgtgccttcctgtagggtattattatacgagctttaaaagatagttccaaacatgtgcgagtgtgtgtgtgtgtgtgtgtgtgtgtgtgatttgattttgtgttgtaagaataaaatcaattgtgaatgtctgaatattattatgacagctataattataacagctaagttttaaacaaataatgaaatatttaaaatgtaaaaacttttcattaaccatcaataaaattttaaaagaaactcaaaaaattcacttaaaatttttaaacattccttagccagaatcataattcttccaaaatcccagtgagcaacgaagttccggaatacttcacaagtaatatagatagagaagcagaatgttgaaatcactttttggagaaaatcacctatcagttatttttttaagccaaagctttaaggacctttttgactttaatttgtaaacatttcctattacctttttaatgctaatcttgaccttagagtctgagaagtcaaaaactaataaccaatcatttttttcaatctgcatactccttgactatcacaactgaatgagttcccaccacaaaattattaacatcattatgcttcatacccatattatgcccatcttttggaaaattcataaatcccttttaagtctctatacaaactgagcagaaggttaaaacaatatctagattatttagtcaaggaactcatctagtcaataattaacaaaataacaccaaatctcaaaatgactgcctacaagagatgacagcctatcagagatgctacagcaagtcgatattcagtcattttcaaccacaaacaagtactattaaaaagtcatacttacaaaatatttcttaaggttttctgcttcttttacatatgggtcctggcagtaacagccaagagaacccaaaacgatgcagagctgaaaagccaagatataacttgtatatttcatcgtttccgagagaattaagccaaagaagttgaaatcagtagttcttgtatcaagctgatcaggtccaaaggacttaactgatctttctcttctaatagctgatcttcagatgatcagaacaatgtgctgcacctcctctggctgctggtatttatacctaattgaagtctcctgaggattacgtattttcacaagttttttaagatgagatggtgacagataggcagggatgatagtttgtattaataactaaggttttgtggcatttgggtgttgtagttagagtttcctttagactccttgggtcctttgacgatgagacagacccattatgcccacctgtgccattctggtgggattctttgaaggcacttttacttcacaccattcaaggactggaaatttttttgtacctccccacttcgccctggtaaaatgttgactcttcattcacaaagcacattgatcatttgcttgtggttgggaacaagtgaaaaacgaaattctagggcctctcaaacctttacaaaggggcagccttttaaaatttttcttgcaaatgaccagaaagcaaggaaagaatgcggttaaaagaacaatttggtgaggaagtccttcatcagagttggttagtaaaatatctaccacaagtttcaaattgctctagatcagcactgcccagtagaaatacaatacaagccacacaggtaaatttaaatgatctagtagcctcattaataaaagtttttttaaaaggtaaatataattttaaaatatattgtatttaaaccaatatatcccaaatagtacttcagtatgcatcaatatactacattgttaataaggtatttgacattctttttgtcatattaaatccttgaaatacagtgtagagaatattcccagggggagttccagacgcagtggctcacacctgtaatcccagcactttgggaggttgaggcgggtggatcacaaggtcaggagtttgagaccagcctagccaatatggtgaaaccccatctctactaaaaatacaaaaaaattagccaggcatggtggtgtatgcctgtaatctcagctactagggaggctgaggcaggagaatggcttgaacccagaaggtggaggttgcagtgagccgagatcgcgccactacactccagcctaggtgacagagtaagattccgtctcaaaaaaaaaaaaagaaaaaaagaaaaaaggaaagaaatacagtgtatattttaagcctacggtgcatctcaatttggtctagtcgtatttcaaacgcttaatgggcacatactgctaggtgctactatattgaacagcatagctctaaacaatttattgttccaaataatcagtactaacagagaatctttttaactttttatttctttgtctttcagatacaaaaaaaaataggattctttctcctcctttgtaatttatttatgaagtacaacactttgggatggcacaaaaagccctccactctttggttcaaacccactttgcatttctacctgtactgtgtacataacagtattgcagttatggggcaaacttgattcctgactcctctactatctagctatatgattgtgagttagcttcttaaatcttctatgactcagtctccttacctgtaaaactggcttgataatagtatcttcttccatgcttcagttgaaaattaaatcaggtaatcctcataaagtgctaggaatttttcctggcatatagtaatcactaataaaagtttattattattttggcacattggatgactagtcatttctttttttttttttttttttttgagacggagtcttgctctgtcacccaggctggagtgcagtggcgcaatctcggctcactgcaagctctgcctcccggattcacgccattctcccgcctcagcctcccgagtagctgggactacaggcactcgccacgcccggctaatttttttttttttttttttttttgtgctatttttagtacagacggggtttcactgtgttaatcaggatggtctcgatctcctgacctcgtgatccgcccgccttggcctcccaaagtgctgggattacaggcgtgagccaccgcacccggcctagt

SEQ ID NO: 2044 - DNA, 4001 bp, Homo sapiens
cttagagctttgctttcaaaacattgagattaaaagaggtgaatgatgtttcctctgcttgggaaccttagctccccgcccagggtctagttacaaagaggcagtggaggcctgactgaagctctgggctccttttatgaagagagaggggagtagttaataacccacaaatgactcacaaataacaggaaagctgtttgcaaatttcacatgtaaatgcctagcagccacccccaacgcctgctcaaagagaaatgagcaagagatctgactccaggagtctttcctcatttacagctagctctgccagtctgtgtctttgctgtgtctgtggatgtgagtgtccctgctggtctgtaggagatggtattttgggggcagctgcaagggaaaaaactgatctgctacttacacagcgccgtagcctcagcctgagggtcttcaggttctcccccagggagttcacatgcgccttgatgtctgggtcttggttctcagcttggggcatcacctcctccaggtaaaactggatcatctcagacaaggcttggcaacccaggtaaccctaagggcaggagccaaaggtgagtgagagattggcggaggtggctgggaggaggggctgctgcaactagcttaagaggacagcttggttctagcgatcctccttcaccagaagcctccccgaagggactgagccctttgtaaaccctctggctgctggatgtgctgagttaacatcttcccacttctccttttcaaagcgaaggaaacaaacccaattccctgcaatcaggaagcagagtctcccttcccttaatcatgctgcacactcccccagcaccccgcccctgctctcaccttaaagtcctccagcaaggactcctttaacaacaagttgtccagctgatccttcatttgctgcaggaagaacaaaaggagaatgaacttgaggtttggggaaataactgaaatgcggtctttttgatgccctttcatttagagatttttttttttaaataaaattggctctggcccaaaaaaatcaaaaggggagttttaaaaacagaggattcaacagtgatgggaccatcacttaaatcaggtcctcctcctcagagtcaagttatttaaaaaatctggccgattttgaagggaaagcagaagcttgactcagtcctggtcttctttctgcggagctacattcggctttaagggacacctatgtcaacccttcggggccttgagcccccctcatgtcctgttctctgcttttctttctccccactgtagacatccagtttagcttggaaagatcccagggattaagaagctccttctaatgcaggtttccctcatgtagagtgcttccctaaaccactggtctttcaggtctggaaacgctctaagcagaggcaatttaaatttccctgctgcaaggcatggggagcatcttcacctcgaatcagacatttctttacttctcctagccaataaagtatagagcgccagcaggatcttataagtttctcagcacgagagagaacgcatttactttataaggcaggtttcctgcacatttactgtatcatctggcttagcttaactcaccaaacccatggcttgatctaggattctcttaagaatttaagtttgggggaataggtgttggggatggaggtggaggcgcaggaggagggttcttatagttccaggagaatgtctagttcaggcagtcccaggaagagagaaaggacaggaaggaatcatactcacaaagaaagtcttcactctgctgaaggcatctcggagatctcgaagcatgttaggcaggttgcctgggaagtgggtgcagctgttctcagactgggtgccctggcctgggctggccctcaccccagtcaggaggaccaggcaacagagcagtgctgagctgtgcatgccttcttttgcaagtctgtcttgtggtttggttttgcaagagcaagcccctgatgtgtagaccttcacctctctgtcccccttttatattgtaagctcagggaggcctcttcattcattaaaaagccacaatcaaggtttcccggcacaggattttttctgcttagagctcctccttctctaacctctctaataaacttagttttcaatttttgcatcgtaagcaaaaatgattggttgaacatgaacttctgcattacagctatttttaggatgggctacctctcttagaataattttttagcttctcaattaaaaaaagttgatttcctggggagaacagctgttctgtgcgcagaggccctcagctgtgggttctcattcgcgtgttcctaggtcacagtgacgtggacaaattgcccattccagaatacaatgggattgagaaataattgggtccccccaacctgggatgaatacccaagacttctccttgctaacttaggcagtcaccttaggtctctgggccttagtttccccaagtaaaaatgagggggtgggctaaatatcctcaaagttcccaagcagcccttccattttactttccagagactggcttcctacagtacaggcggggtcacaggatgtgttccaggctcctttaccccgatttcattaggattctcaggcacatgtttccacctcttcagctgtcccccaccccaactgtgcttgggggaagtgggtaagagtagtctgcacttgctgaaagcttcttatatgctagtcaggtagtgctcaccatgacccctaccgtctctattttatagtgagcaaactgaggcacagagatattacatcacctgtacaagggtacaccagtgccaactgagaatttggtttcctcaccctactgtacaccatctccagcacatagaatgaaaccttggattaaattggccttagagtttcttttagttgtaagcttctgtggctggagtctaaagtttaaaagatggggtggaagaagttgaaataacaaggaaaagaagtcaggattccatggaggctggataggaggtcccttactttcctcttacctatccctacttccccttcccaaagaagccttagtagtgttgtcttggatttgtgtgtgtgtgtgtgtgtgtgtgtgtgtgtgtgtgtgtgtgtgtagaaggtaaggggagccagttgggttgcggcgaggagtgttgctctacctggggaaggaccggggcagtgacatcaggacttcttcagatatctggaaagtctctggggatcctttgattgagccttcaccttccccttccacaggggctttgcctgccattccagtttagactgtaactgggaggaacactgacctaggtgcaggaggcctgggctctgccttggccctgccactctatagtcagggcaaatcactcatcctccctgtgtctgtttttcatctgtcccaacagggcaatagcacctgtcctcctgcctgccagggagcattgagcttaagtagccatggacccagatggagggcatttccagtgttctgctagttcttcacctttctgcatcagcaatgggacaactccagtggcagcaggttctgagcttgctgcactagagaaggtcactcactgcaaggggtgcaaacaccttggggcccagccagcgtgaagtgagtgggagggagggatgagagggcccacgcccaccctgtggatgtccctgctgtgtgacctatggatcagggtcaggggactgtggtgtctcttcccaactcttcagggagtgtcaatgtagaaacctaagaatcaggaagtgagaaagagcctgctagaaactagtatggagctaactcagaacttactggtcctgccagacttagactggcttaagggttctgtctgagttctgctgccaggaagcagagagaaggggaccaggacctgggtttccccttcttgcacctttctccttccccctcggctcctgggttttctgggctgtgtctgtgttagcctgcaggtctaacc

SEQ ID NO: 2045 - DNA, 4001 bp, Homo sapiens
aggccaggagcggtggctcacgcctgtaatcccagcactttgggaggccaaggcgggcggatcacgaggtcaggagatcgagaccatcctagccaatgtggtgaaaccccgtctctactaaaaatacaaaaaattagcctggcgtggtggcagtacctgtaattccagctactcggcaggcagaggcgggagaatggcatgaacccgggaggcagagcttgcagtgagccgagaccgcaccactgcactccagcctgggcaacagagcaagactccatctcaaatatatatatatatataaaactgataatgatggatgggtattttatttgggaagctaatagggattttaaaacagaatacataaatgtttaaatgtcttggtaaatatatctagatcataatgatatgtgtgaacttctgtatagctttgaaaataaaacaaaaaaaaaggtgagaaaaagaactgggaaatttaaacctaaagaagtttctcctttgttttgtttttgtttttttatcttttctctctcttttattcctcattttcagtggggttggctctcctttattgtgatatttggaaatgagagtcagaaaatataacagagataactcagttcaatgttcacattacagtgatgaagaaatagagaagtgaaccagccctccatggcaccgcaaggaagtggcacaactgctctcaaacctctatctccttacctctggctcagcgccctttctaaccccatgctgccctttcactctaggattaggtagagtggaaaggaacctagacttgtgaggaacctcaagcccattcagcagaggaggtgacataactctcccaagccatgctgttctgacttgtcattacccaggaagctgaggacttaaggaaatccaaactggccacacctgtgctcctggggagggaagcacaaatccacattgggcacctatgccacttcagcctgtacttccttctcctcctccttttttgcccacagggatcttggtcaaagtctgttcaaagcctcagaccctgggtgacacatcttatgtcaatgggctctgtggttcaaatgttatgaaagagccccagtggtgatgggatggagggatagtaatggaaagagcccaactgatgcctccccattcctctcctgaacaatccactcttccctaggtaggtggactttttaaaatgcaaacccagtcttggaactctccagtctaaaactcccagcataacgccctggggcctcccagtagcaggaaatctgctccccacagcatccagacccatcacagcctggacttcgcctacattttccgcctcatctctcttgcagatctcccacacctcacaggctcatctcacctagaaagccccgctgcctcacctaccttgtaaacaccaacctaacgttcaaaacctagctccagtgtgacttcctttgtgaaacttctcccctcttcctttcctctccccactcccctcctcctccccacttcaaccctggttgagttgaccactactttccttttttatattcccgctggatacaagatgcatatttaactttgaatttcaatgaaaacatctcagtgtttatctacctgaaattccaagttaactgggtgtcttgtatttgtatttgctaaatctggccatgcatagctcatacaattgggtggggagagtccttttaagaaattgaattcaggctgggcacagtggctcacacctgtaatctctgcactttgggaagccgaggtgggaggatcccttgaggccaagagtttgagaccagtgtaggcaacaaagcgagaccacatctctgaaaaaaaaaaaaaaaaaaagctgcatgtgttggcacatgcctgcctgtagtcctcatgcacacctgtagtcaggaagttgaggaggcaggacaattgcttgaggtcaggagttgaagactgcagtctgctataatttcaccattgcactccagcctgggcaacagagtgagaccctgtctgcgggaaaataaattgaattcaaaaatagaaatacaaaattagagacaaaagtaaacgtttatttagaaagagaaattacaacaaattacaaatcataaaagctaacaaataccacaaacaccacaaaatccagaaaaaaaaatctttattctttaactcctgacaactttttgtttccttcttctatgtcaatacttttttttactgtgcctctgggagaaccagagaatggtattgggttcaaatgtttacgtacctttcactccaatttctaacatttctcatggtcacatactcaagatgttgccagaaaagaggatcccaatctagaccccaagagtgggttcttagatctcacacaggaaagaattggagcacagacaaagaagcaaatttattggaaactactccattagagagtagggcatgcccagaaagcaggaggaggaacccctgtcctttaggaacatctctgcttataagaaactataaggagctatgattaaacttggaatgtgcagatgtgctcactaaaggtaggggctgttggtgctctagtgaccattaatccttcaacttgagtctgctcattgacgttatctctgagtaaagtgggctgtacttgggacatctggacattctgcaggcttggtgggagatgtcctatatagccatcaatcttctgtaattataagtggtggtgagcttagaaatgtgtcactccagtcatgttttattaaaccagaggcctggtaagcaggagttcctctaacaaaattcatagactaaaagagtagactcacactaataactaacaagtactgagcacatttgccaccccagggtctgtgtgaagcatccatatgcattgtctgttttcatcttcacacctattccatgaggtcaatactatttttgtgtccatcattttggataaggaagatgagacttggagctaccaagtacttcacccaaagacacccaggtggggtgtggtacagctgcgtgcagtcataggcagcccactccagggcttcattacaccagacatgaaagagcatctggcccacccttctcatttacagatgagggaacagctgaggcccagagagaagcattttgttctttttgttttttttgttttgttttgttttgttttttgagacggagtctcgctgtcacccaggctggagtgcagtggcacgatctcggctcactgcaggctccgccccccggggttcatgccattctcctgcctcagcctcccgagtagctgggactacaggcgcccaccacctcgcctggctaattttttgtatttttagtagagacggggtttcactgtgttagccaggatggtctcgatctcctgacctcgtgatccgccctcctcgacctcccaaagtgctgggattacaggcgtgagccaccgtgcccggccgagagaagcgttttgaatttgaaaattgaattcaaaaatagatggacaaaattagagacaaaagtaaatacttatttagaaagaaattacaacaaattacaaattcataaaagctaacaaataacacaaacaccataaaatccagaaaaaaataatatttctattcattaactcctgacaactttttgtttccttctcctatgtcaatacttttttttactgttattttctataaagagaataaaaaaatattcagtctgtcctttgctatggttgtttccatcagcttaccccaatggaaggttaagatttaattctttcataacactccatacaaacctgttatttctttcccccatcccaccaacataagcgtatcacaacggcacttctttctaggcaatgtgtcacccacattgtatcacaactttctgtttccttcgtcagacaactgagtagtggtggagctgggaccggaggccacatccctgaactctcagtccagtgctctttccattcacagaatctttgt

SEQ ID NO: 2046 - DNA, 4001 bp, Homo sapiens
gccttccagaccccaaggcaattggcagtggctacttacccactgcctcccggacttaacacacacggccaggaggggccagggccaatctccccattcttttccccatattttttgtgttccagatatactaaatgtctcaccttcctccagacacagcagctctttcacaatgcctaaaatctttttccagataaatgacttcatctggaagggcttgatcaccatcattcctgtctcctttccccatcccggtttcctaaacacatgcacactcacatactcaactcccactctccctggcaaactcctattcacccttcaagttcagtcatgtgtcactgttcttagcaaaacctcccttgaccacaccctcctcctccaggtggtaaatcactctctctttggggtcttacggcacttcctccccaacccttaactaataatactgtcatgttgcacagcaacatatcggagcattcatctgtgaccttcccccctaccccaccaccactgccctgccccagggagacaactcctccagggcaatgctggagacttacacatttctatccttggcacccagctgaaagcctagtttagaggaaacggtgttgactgattgatggtcttcaccactacactggaagctcaatggggtatggactttgtcttgttcagtgttgtgtcctcagcagtctggtgtgtagaaggcactcaataaaaattggttgaattaattgcatttaatcaagcctggacaattcagtgaaatgaaacacttggccaagttgcttaagttcctgaaaattgatttatctgaagattatcaatgactttggataattattaaatatatctttttttgtgcaagctgtgaaatatatggagataaacaaacttgcttatagataagtgggagaggggatgagatgtttgtaaaaataatagtacacaagatagaaagcaatacatgtcaagaagagaaagtgctgtgggtattcaggagagaggtcacttcctccataggattgatcagagggtcttcacagaggacaagccatttaacttgggacaccattgatgatgttttccaccctgaccttggtccacaggcagccatgtgaccctggtctcctggctatagctgattggaaagtggacaactgacctaagctgttctgttagtctctgtctcccagtaatttggtcttgggactttagagcactagtcagtcttggctggtcccttgaattaaagactggtagcctctagagctgtgcagttgcagtcctctgcaaactgctcagagatgcagagaaagctgccaagaaaagcagaaaggagtgactacgtggcctcagagagcgagaagctgagttctggctttctgatgacttctgctcctggttccagtccctctgtgtcgtgcagcagcttccatcccatggatattctgagacaccccaggctccttacagtaaattccccctttttgctgcagctagctggactgtaccattgcagctagcaaccttggtgaagactcttgttgtgtgaagaaatgggccatgaccagtatgggagctgatggggaaggggtatgcagatatggtttatttgtctgcctttccaccctacactccctcactcaccctcagcatctccagtatggtgacccccccttctcccctaaacctggccagcagtctggcaataaggaactttatgacagacaaaggcagtcctgtcagttcataggtgtctgaaaacccagtcttccagagtcttgaaataaactggatatctctggtcccagagaatggctccacatccagggtccctatagcagaaattacttaccccgtggaacagagccccaaagcactggcacacacacatggatatgtgtgtgcacatgtgtgagtggtaaggaacacgcagatctgtgcggaaacgctccctcagtgcacattcttggactcctgtcagtgtgtgcaagcaccgctctatggagaaaatcatagagagtcatcattacaaaaaggtacactcagctccctccttctggtggctttgaggtcggcaaaagtgcacacacggcaacctctttacaaaaattcaacccagctactctgaaccgaatcacaccctcagtcaaggcctgtattgtgtgggagagctccaggaggacagtggtgtttctcggtgcgctgtgggactctgacatttggtaaatcgggtcggggaagagggtggccagattttatggggcccagaggcatatataatgggagggagaactgtcttttaagaaaaaaaaatgtgtatataattactttggctgtggaaaggactaatgaaagtaagagatcctgaagcttttattagcgtcacaggaaattgacttgggggtgggaaggtgggcgcttaaaattaaatcccactttcctttgctctgtccttgtcatttctatacaaattgaagccccccaaggactgcaggtccacaacagcaccacttcccttgcagaggggatgcctgggctgtagtgtgggcttgcacacgccccctgcaggctagcgaggtcaagactggatggaacaacgggccaggtgaagaatgtgaactaggcagctgcagtgcactatgatcgcacctatgaatgaagagccattgcactccagcctgggcaatatagtgagaccccatctcaaaaaaaattaaaagaggaactaggcagcaagaggtctggggaatgtcatctgtccccatgacctacagcaggtgtgccatgcttcctccttcaactccacctcaacacaaccaaacacagaaggtgctgggctctctgagaaaggactgcctgtcaggaggtctgtggcctgtgagtcacggctctgccactagctagctctgaaatccacttcttctgcctgtaaaatcagggattaggttggatgacatctaaggtttttatcttaaccctcttcagaaattgcttcatctcatagtcacgtggagaaagagccagaagtcaatatccctgaatgtggcacttcctgccaaccacgacaccttctccagactcccatcatgtcccagggagtcctgatccctgtggggacatagtctgaaatggccagctgctgtcctcctttggccacggaacctctagggtttgtgagtgataagagtaggtctggaggaggcagcaggaaatgtccttgagaaaaaagatcaggaaaatgatttttccatttaaagggcaatgtttcaaataattttttaaagcaaatgaatgtagacacctgcccattcccaatatacaaattcccaaacattttcttgttttccaggaaaaacagtaaagggctcaggataagctacagtagcagaaatggagacatttgcaagaatacctgaactctcggaggtgggggatgtgtaaatgggtgactgcaggtcaatgtggaaaccctctggtgcctctgacgtccatgtgtctgcttaggaggatgtacgacatgacctccacctcaccccaccctccgccatgaattcccttcctgcctgagaattctacaccagttgagcaagaaagtacaaaggaggactgacttggcaaaatcccatggggccctggtgaaatgaacaggtttggcaatgattgtgtcactatgaccccggacaagtgacttaacttgaccatgcaaaagccaaggatgttcacatcctgtcccgcagcaaagtctctacactgcagggagtgagccctgacccttagaggctgaccccagcgaaggagtcagggaaggttcttcttcctccaagtcttaccccagcctcagcacaaggaggctttgtgatccggttttcgagcaatacttcccatttactgggctgtgaacatccctgagtctgtagtcctgggctggacaaagggtgagaatccagacaaagatcacaagacagccattactgtctgggcctcccaga

SEQ ID NO: 2047 - DNA, 4001 bp, Homo sapiens
ttctatattatatataatatttcatatttctatggtatattacaatttaaaagaattttctccaaaataggcccatttacttctcacagtcatcttttgaagtaggcagtgaagtatcatctccactttataaataagcacactaaatctcagaatttgaccacataagtaggtagagccagaattagatttcatttctttctcattatagcattaacatagcatccttggaatcaaatatttttattagtttctaaaatcttttgtaaatgtgcaatgagggttaaatgaacaaatgaatagagtttatcattacttttggtttcaaacttagatttccatgaattctaccaccccctaaattatgcacataatctcatctttctaacactctttagtgggaaaggtaggtcaagacaataccaatcccctgatatgtccatctattgcgctttcaattcaccactacaaattctacaaattcgggtttaagtttttggcatgaacaatgtggagaaattttcttcagaaaacagcatctagtatctttatgttgctggagttgcattatgtggctctgattaaactagagtaacatctgtaagctgtctcctttacatctttcagaagggtagttagaagcagatttctcttgaattaatagaatttgagtcaatgggattgcatctgtgtccccttaaatcctattattttctgggcttggattcaccctggcacaagctctttctggcaccagattttgttcattctctcttaactggcacagctactaggtagctttacacacctaatgtagcctaggagcttggatgattatgcttatgctctatctgaatccaaaaacaacctaatgaagcttttaatcttggaaaataagtcatatagcattataaatctcaagttctattggtaaaaagataaagtccaaaattttactttgtatttctcagtgaaaattttatctttaatactactaataatagctaatgcttgtatggtatttaccttatgccagacacggttctgagtgctttacatttacttactaattctcacaaagccatattaagtatatacagttattcatttaagtagacatgaaactgaatcacaaacagagtaggtaatttgccaaagatcatgaaagctaggacatggcagagctgagatttcacttcagatatctggccccagactctgtgctattagtgttatgctgcctctcacttagaaacctttcctaaaacaagaaaagatttttaaaagtgggctccttggaaatagattttggtattttacatactaaaatgacataatcaaatattttagagttttacatttttaaatgaaaccataaatgaacatttttgtttagaattgtcttatcgataaagtgagaatattatttttatgttttcttcccacccccaccaacacacaaatatatattaaaaatataggtaaaactgttttaatagaggcttcattatcaaacttgggttttcaaaaaaacaaattaaagttactctttacctcagatgagctgctattagtcccatctgtgcaaattttcatattactttgaattttattaaaacagaaattgaacataaaatattgtacttaccttcttgggcatgtaaaacttaaatgtgagcatcctggtgagtttgggattcttgtaattctaagaaagtataatgcattgttattaagaaatgatctccagctagattactaaatgtaataattttagtaagaaaggaaatatacttacattaattccattcaaaatcatctgtaaatccagcagtaaatgctccagttgtagctgtgttttctttgtagaacttgaagtaggtgcactgtttgtgacaagtgcaagacttagtgcaatgcaagacaggagttgcatcctgtacattgtggcaggagttgaggttactgtgagtagtgattaaagagagtgatagggaactcttgaacaagagatgcaatttatactgttaattctggaaaaatattatgggggtgtcaaaatgttttacatattacacatattttcaaagactttacctgtctgaaaaaacattaccttcatttttcctcttctgatgactctttggaatttctttaaacccccaaagactgactgaatggatgtaggtgaaatccctctttgttacattagcccacacttaggtgatagctctaattcatgcaattaacgccttctgtatgaaacagtttttcctcctttctttaagggggtggggatacaaaagtaactcagaaaattttctttgtcataaaactacactgaacatgtgaatagcatattgtggtggacaagagcaagagtaaacagatgaaaagaataaatgtttagatttgttgataaaacaggaagtgtattggtttcctgtttcagaatggttttacctttttatccacacaatgagctaattgcatacaataagatagattgcttcttacatgtcagctagagaaatactaagattagaatacttaaaatgcttattgagcttgaggtactgtttaacgctattttaatttaaaatgattatatatctgtttaagtctcttaatgtctattgtacattttttaaagggtgcgattgttaaatactcagaaaaaggtttgcattcaaggatactgatgctagttttataatagactttgtatgtgttatgtgtaaaccagtccatgtttctcgtttttatgtctttacctctttaatggatttttatttatcctctaaatcacctgggacactatgaatgtaacaataatcgttatgaaatatgatcttgtttttagtcagaagactaggatatttaggataggtgttcattcatcctcagtacagtgcacaaactggctgaacaattgtacggatatatacttctaatttaacctggggacacttgaggagatcctgtctcagagagagtccttgtaaagcttccattctatggccttatttatttcttacctggactttttttttttttttaaagatggtattgtctgtgtttttgtttgtttttttaagacaatattgtctggtctttaaacagacatctagcacctataatgccttcaggtatatagaaagagagaaaagagaacagtgtacaggcaggcacttagtctaatataagtcttacagacttgtgaagtgatggctcctattttgcagattagaaaactgaggctcagagaagttaagtaatttgctctaggtcactcagcccttattgccagtaaggggcagaagaaggatttgaaaagagaatgttctgactccaaaaatccactctcttaccatttgtattttttcaaagaacctgatttgtaatagggaagatatgtacatacacaagtgtagtcctgggtgataggtgattgctgccccaagggaggtggatataaggaatcttgaataaggaacaattaatttaaactggattttgaggagggtgcataggcaggaatgattaaagcagtctaaggaacagtcaaatgtaatattttacaaagaacagagaaaaatggttcaataagagttttctatgcgttaggtaatgttcggagaatataaaacaaatttaaaaataaagattatagtccctcaagtagaaaaaaaaatgaagaaaaggtcagattagggccaaatctcatgaactttttatacgaaaaaatgcaaaatgtctctatacatttcagatcaaaatcacattaacgctgttataaggggcaggctatttggtagtctgtgtgttatttatttaatataataaagtacagctttattatacttgttttgcttctctaaagagtttcagtgtctaatcccagcatcatcactcaggcctttacccttccagaatggaagaattcaagcccacacattttcctatgtgggggcttttccaatgaggtatttgatgttctc

SEQ ID NO: 2048 - DNA, 4001 bp, Homo sapiens
catccgtatttcattacaccctccctccctctctggcctcccagaggaaactggtgtgttagttacagcgtgaatttcaaggcagttcaaagctctccatccagtcaaagccaacccccttgccaattaaaaaaaaagtttcctgcaatccttgtgttcatcaggcaatcccaatccttttctaggctaggctggttctcaggagggaaagggccatgtagctgttgtctagggcgaggctgtctctctgcaactaatttaaagccacctaaaaagctctaactcaggatcatgcactaaccagcctcttgtggaaatctaaaatctaatccatttcacccagaggaaaaatcgccgcttggacagctgaaccgaagccattcacagcctctgaagaagcgaggccaccccagggggtcggtcccgggggatagctgccccaccgtggctgaagatctcggctgcagaccaaggaggggcggggagattctgaggcaacgtttcaacctcgtaaggaaccgaggccttgagggtggccgggggcccctctgtgaacttgatcggggctggtggggcgagggcgccccccaggacaaggtggggacggaggtgtcgccacagagcacagcggaaaccggggacttcgccaggagggcccaggataacggagggcgactcgtgtatgtcgcggaggcggctccggggacccgggacttgtcgtcgcctttgtgacaggaaccgcggaggaacgccaggcctcccctgcatccgcctcgccccggacaaggtgaggctcagacttccgcgccagccccgccccgctcgtacacaagccccgtcctcccgacgcccgcctccgcctccaccgcctcacattggacaaggggagtggctcgagggtggcctgttggactacacccaatggaattcggggggcgggccaaaggggcgggggcaggggcgggagggggtggcccccgtcccggagcacgcggcggaatcccgggactgcacccaactcaggatggcagtggcgccctggggtcgcgcaaagcggatcgggacccctgagcccgcggtgacctccaggctggacatccgggtctccagtcgccctcgcccccagaaggacttaaggcgggggtgggagtgatcccttgttttaggactggaggtccccacacccagctccgagttagaagagagggtcccggccgggcgcggtggctgacgcctgtaatcccagcacttttgggcagatcacctgaggtcggggttcgagaccagcctggccaaaatggtgaaaacccgtctctactaaaaatacaaaaattaggcgggcgtggtggttgggcgcctgtaatcccagctattcgggaggctgagagaggagactcgcttaaacccgggaggcggaggttgcagtgagctgagatcgtgccactgcactccatcctgggcgacagagctagactccgtctcaaagaagatgcggtccctcaccctgtggagacttgggggacagcggtgccccgtttcccttaaatccctcagactcctcccgaccctcgcgctcccctcagcgcccccctccagcgccccctccagccgtttgggaaggaccccgtgccattaccccacaagtctcccagggatggagtgattatttgtacccaaaaaaataaattcccaagggccccccgggggctccctctcaacctattctggcgcctggagcaagccttacctgcagtccccgccgcggcgaggagcaaggcgacggtccagcgcaatttccagccccagggccccatgctcgcagcctctgccaggcagtgtcccgacccggatcacgacctgctgtgtcctagctggaaaccctggcttcccgcgattgcactcggggcccacgtcatttacagcatttcaatgtgaggtttctagcagggggaggagtttgcagtggggtgattttcaaatgtcttcacctcactgcaagaggaggagtttcgaacggccgatgtgacatcggctttttaacccgtgaagctctgattcccactccagtccttcgaaagtgtcgccagggcaggcgacttgatttgttgtatttgggtctccggtgaagagctgacgccccctcaaaattggaaacgcatcttctgaaagatcctcctgaaatttctcgatgtttaactgttaacattttgctgttgttgtccacagaaggataacaacagcctttcaagatcctccaatagcctaatgccattgtcctctctgcctcaaaaggaaaacactaaaaatgttgggaacttccgccactttctatatttgccttttcctttctaggaattgtgtatagatttttagcttcctttcgttgtatattgtttttacattgttattccaaatcacctaatagacactgatcaatcaggaatttaaataaaatcttcacaaaagtacagccaaaaaaatattttttgttttgtgggatcccgcctttggctgagtataaacatctgaaaaatcaattgtacggatacctggagtctggacgtaaatattgatttctccccttaggagaaggagttgaacaaacagaagggcggtttcctctccctcaaagcaaaatcaaaacaaaacagggctttcacagttgaacttgaacccctaagccacagagagctggtggagaccaacttttagaattgagtctctttggggactcatggggttgccagaggcctcttgccaaaaaggcacatgtgagaaacttgcctgaaccccacacagggctgggcagtcttggcggttcccccaggaataagctggatttctctgggattttgcaaactgactttggcaggcagtgctaacctctcagcaggattttagggaaacctaggagaccaggcagaaaagggacaaattgaactctcagaaggacaaaaaaaaagattaatcagggaaaataattttttaattatttttattataattttttaaataattatttattatttatttatcattatttccagctgtcactcaggctggactgcagtggcgtgatcacagctctctgcagcgtcaaccctgggctcaaggaatcctcccacctcagcctcctgaatagctaggaccacaggagtgcaccaccatgcccaactaatttttaatttttttttatagatggggtctcactatgttgcccaggctggtcccaaactcctagcttcactcaatcctcttcctcttgcatcatgatgcctctcaaattgctggctttacaggcatgagccactgtgcccaacccagaagaagaaattgatgataagaatttttggcagttaagactcagtttcagaattcggccttggacagataaattagctttcccaacctgtaaaggggccatcaaaatgcttgaacctacttggcaggctcagtgtcaaggtcaaattgaaataattagcgggctgggcatggtggctcacgcctgtaatcccagcactttgggaggctgaggcaggtggatcacgaggtcaggagatcaagaccatcctggataacacagtgaaaccccacctctactaaaaaaaaatacaaaaaattagccgggcgtggtggcgggtgcctgtagtcccagctactcgggaggctgaggcaggagaatggcgtgaacccgggaggtggagtttgcagtgagacgagattgcgccactgtactccagcctgggcgacagagtgagactccgtctcaaaaaaaaaaaaaaaaaaagaagtaattagcaatcacctagagaagtttacaaggataggcaagttctaggagctgctgcaacgtttataaatgtgtccccattgaatcccattccttatgccatttgcgacattaaacaaaaaagtgaagtctggatgtggtggctcatgcctgtaatcccagcactttgggagggtgaggcggggggatcacttgagcctaggagttcaga

SEQ ID NO: 2049 - DNA, 4001 bp, Homo sapiens
tccccttccgagaggcccggccaccggctcgggagctgggccggtcgctttgggagcggatgaggaaggttaggagaagcagcgagatagatcccaattttacaattctattttctttcggtagggtctcggcgtcctgggccacgttgagagcgaacgtgggccgagcggaggacacagagtaaaaagcgacgcccgctgtatacataaatccgcacccgctgcccgcccgggtactgcctgctctggcttccgctctcttccgaggctgggcaagtccaaaagttcccgaaaggggggttcaaagaggggcgctcagtgcacgtgatttcgtttcatctagggtgttgggggtggggagattcctcactggatttggtttctccagcagaactgtctcatcctccacattcatgccgctctagcggttccgagtgaaagaggcaagaggtttaaaggacagaaggaaaactccctcctgctaaaaataaataaataaaataaaataaaataaaatacgggcttcccaaacttgaaaagctccaagggcagagtgggtgggggagccgtaaccagaatctctggcttcagctctgcaagacccgtgtgtggacactcttccggggtccttgactcgctgctcctcctctgtcgctgcaaaggagttgtgaggggggacccacaggacccgacatccagctccagttaattaacgcggagcctagggcccagccgcgcggtctaatccccgcgctgcgttgcctactggcccagaaaagtctctctcggccttgcccatggctgaaattggggctggagttggtgggggagagaagcctcctcgaacttgggcgctccaggcctcgggtctcggatgctattgcctctaggccgcgagaagagggcggcatttatgagacgtcgatcagctccgagattaaaaatccagccctgggtatttttaatcacttgccactcagacgcctacgaacaagctcgcccgcccctcgcggctttggggaattcggtgcccagtgcgtgaggcctggggcggcttgttggatttatttgggtagggacgacccacaagcactgacggacagatagtgatggggctcaatttagtgtatgaagaggggcgctagcttccctatcgcggaccaggtcccagagagcggggctccagagctcagcgccaagcggaaagagagtgcgcccaggacgcacggcctgaacactcacccagcagcgaggagaaggaggccgaggtgtcgatcgcgctttggaagttctcctccatctttaggccgtccagcatgttcgggccgggccgggaggacctgtagaggagaagaaacgatgcgtctgacgtccgtgcccgctgggactcggcgccagcagccaccgcactcctgggaaagaactgagggagtgtccagggcgaccagaatcagccaggaggatagggtccagccaagagaatgtagggtgggaggagagatcagtcacagcgaactgctctggctgatctgatttcacttgaagtcaacacgttatgtacttaggcctccgccccccaactgcgtttctccttctcctgcccccctcacccccacctacatcccttgccccaggttttccatcccgaatccgactccgccccaacctatacgaaggtgggccctcgggacgtctctgcaggaacgcagctactggggtatattgggtatataaagagtgggtaccctccctcgagcgaccgggtccaggcacgcgggacgatggggtttgcaatcccgcgtcccagccgccccgttgcggccctcacctgccccaggtcgagaaggggcactgtaagggacccggagggcgtcccgcccgcttctggactcctggcgctgcgctctgttggggtgcgcgcaggagccggtgtgcggggcgcgcggggaggtcctcccgccagtcggccagtgccgggaatgtctgcagaagcaaaagagtcgcctcggggaggagccccggctggcccggctcactcttggatgcatttcaagtcaactttcagaaacacgcccgcccgagccacagcctaggcacgggcagccttacttacctggtaggcgagctctctcccagtgactggagcagagagaagttgcggagcgctgctggaagcttctgcccgggaaggcgtcgcccccgagactgcagccggaggagccgccctcggcttcggagcgccggggagggagccggagcgaacgccggccgctggctctgctcctcggcgcgcccaggctgggccgggacgtggtcgcgagctgccggccttcccgggacgtcctaccagcccgcgtcgctcctcagcgggaggagagggccagttgcttctccaaggctaggagggaaggcagaggcccagggtcctgggtgcgagtcggccctgcttcgccggggcggatcctgcagcttctgacaggggccgcggcgctgcgtgcgcggcggcggagagggggtggggtgcgctgggcggggggctggcagcgcgtcccgtggcggggccgtggtgctccctttcccagcctggctgcgcggccaccacacggccgctgccctctgagcccctccgcctctgggagctctcggacacgctaagtttcctcccctccacgtgtaactgttacctcggggcgctctggcccggtcgccccccagtgcccctcaccccgactgggcctttgcggagatgtcggcgcctcctggacagcggtgccgccacgaggattcccccgccgctctccaactgctgctataaaagcgctgcaatccttacccgggccccgggaagcgctgagaagctgtttagcgccagtagatgtgggcccagcagctcctagctcctcaaacccctcatcacccgagggctcatgccagtttccaacttcctttaaggtcgaaccatattcactcatggggcgtacagaggccatgggactcacggcctaagaatcatgctcttgggagacactaggtgggatctgccccccagatgatgaacttgcaatgacactcaacaggaaatcaggtaaagggacattgttaggggaacaaagtatctggggagaaatgtgaattatctgcacctcctaactttaatttacaataacagacctttagccccctccagagcaggaataaggccttatccgtctgtatagcccaggaggtaagcatgttgtgtgaccccaagtggatgctcaataaataaattacaatgctggctagcgtttatcgtttattttgtgccagctttgttacacagtcacctcatttaatctttacaacaacccccatgaagtggagacaattgttgtcccaatcttacagttgagggaaatggaagggaattcatggaatccgagtcccatcatctgaataccatgggaaggttcagttcaattcagtgtgattctctggggcaccttcagttcctaaactgaactgaactgagatgaaattggcaggccgtttgacatggtgaactcaggcagaggagatgccacatagccagggtttttctattacctcctccaaagacagagccacttctttattcctaaagaaaaagtgctggcagcaacttgctctaatgtgcttaggagcagcgaccccactaagcactaaaaaagccattctaagtgctttctgccagcaggcacaagccaaacactgaatatgactccagaagaaagaggggaaatggcaaagaggctaatacgttatattcgaatgctgctttacaggcattttcacatacatgattttgcttgatctttacagcaaacctgtgaggtaggcagaacagttttatcttttgtttcagatgaatctttggagcttagcacggctgggagatttccctgatgttgcccagatggctagtggcatgtctcctaacacctgacctctgtcctttctgtcaccccaggtagagcagggtg

SEQ ID NO: 2050 - DNA, 4001 bp, Homo sapiens
cctcctgctaaaaataaataaataaaataaaataaaataaaatacgggcttcccaaacttgaaaagctccaagggcagagtgggtgggggagccgtaaccagaatctctggcttcagctctgcaagacccgtgtgtggacactcttccggggtccttgactcgctgctcctcctctgtcgctgcaaaggagttgtgaggggggacccacaggacccgacatccagctccagttaattaacgcggagcctagggcccagccgcgcggtctaatccccgcgctgcgttgcctactggcccagaaaagtctctctcggccttgcccatggctgaaattggggctggagttggtgggggagagaagcctcctcgaacttgggcgctccaggcctcgggtctcggatgctattgcctctaggccgcgagaagagggcggcatttatgagacgtcgatcagctccgagattaaaaatccagccctgggtatttttaatcacttgccactcagacgcctacgaacaagctcgcccgcccctcgcggctttggggaattcggtgcccagtgcgtgaggcctggggcggcttgttggatttatttgggtagggacgacccacaagcactgacggacagatagtgatggggctcaatttagtgtatgaagaggggcgctagcttccctatcgcggaccaggtcccagagagcggggctccagagctcagcgccaagcggaaagagagtgcgcccaggacgcacggcctgaacactcacccagcagcgaggagaaggaggccgaggtgtcgatcgcgctttggaagttctcctccatctttaggccgtccagcatgttcgggccgggccgggaggacctgtagaggagaagaaacgatgcgtctgacgtccgtgcccgctgggactcggcgccagcagccaccgcactcctgggaaagaactgagggagtgtccagggcgaccagaatcagccaggaggatagggtccagccaagagaatgtagggtgggaggagagatcagtcacagcgaactgctctggctgatctgatttcacttgaagtcaacacgttatgtacttaggcctccgccccccaactgcgtttctccttctcctgcccccctcacccccacctacatcccttgccccaggttttccatcccgaatccgactccgccccaacctatacgaaggtgggccctcgggacgtctctgcaggaacgcagctactggggtatattgggtatataaagagtgggtaccctccctcgagcgaccgggtccaggcacgcgggacgatggggtttgcaatcccgcgtcccagccgccccgttgcggccctcacctgccccaggtcgagaaggggcactgtaagggacccggagggcgtcccgcccgcttctggactcctggcgctgcgctctgttggggtgcgcgcaggagccggtgtgcggggcgcgcggggaggtcctcccgccagtcggccagtgccgggaatgtctgcagaagcaaaagagtcgcctcggggaggagccccggctggcccggctcactcttggatgcatttcaagtcaactttcagaaacacgcccgcccgagccacagcctaggcacgggcagccttacttacctggtaggcgagctctctcccagtgactggagcagagagaagttgcggagcgctgctggaagcttctgcccgggaaggcgtcgcccccgagactgcagccggaggagccgccctcggcttcggagcgccggggagggagccggagcgaacgccggccgctggctctgctcctcggcgcgcccaggctgggccgggacgtggtcgcgagctgccggccttcccgggacgtcctaccagcccgcgtcgctcctcagcgggaggagagggccagttgcttctccaaggctaggagggaaggcagaggcccagggtcctgggtgcgagtcggccctgcttcgccggggcggatcctgcagcttctgacaggggccgcggcgctgcgtgcgcggcggcggagagggggtggggtgcgctgggcggggggctggcagcgcgtcccgtggcggggccgtggtgctccctttcccagcctggctgcgcggccaccacacggccgctgccctctgagcccctccgcctctgggagctctcggacacgctaagtttcctcccctccacgtgtaactgttacctcggggcgctctggcccggtcgccccccagtgcccctcaccccgactgggcctttgcggagatgtcggcgcctcctggacagcggtgccgccacgaggattcccccgccgctctccaactgctgctataaaagcgctgcaatccttacccgggccccgggaagcgctgagaagctgtttagcgccagtagatgtgggcccagcagctcctagctcctcaaacccctcatcacccgagggctcatgccagtttccaacttcctttaaggtcgaaccatattcactcatggggcgtacagaggccatgggactcacggcctaagaatcatgctcttgggagacactaggtgggatctgccccccagatgatgaacttgcaatgacactcaacaggaaatcaggtaaagggacattgttaggggaacaaagtatctggggagaaatgtgaattatctgcacctcctaactttaatttacaataacagacctttagccccctccagagcaggaataaggccttatccgtctgtatagcccaggaggtaagcatgttgtgtgaccccaagtggatgctcaataaataaattacaatgctggctagcgtttatcgtttattttgtgccagctttgttacacagtcacctcatttaatctttacaacaacccccatgaagtggagacaattgttgtcccaatcttacagttgagggaaatggaagggaattcatggaatccgagtcccatcatctgaataccatgggaaggttcagttcaattcagtgtgattctctggggcaccttcagttcctaaactgaactgaactgagatgaaattggcaggccgtttgacatggtgaactcaggcagaggagatgccacatagccagggtttttctattacctcctccaaagacagagccacttctttattcctaaagaaaaagtgctggcagcaacttgctctaatgtgcttaggagcagcgaccccactaagcactaaaaaagccattctaagtgctttctgccagcaggcacaagccaaacactgaatatgactccagaagaaagaggggaaatggcaaagaggctaatacgttatattcgaatgctgctttacaggcattttcacatacatgattttgcttgatctttacagcaaacctgtgaggtaggcagaacagttttatcttttgtttcagatgaatctttggagcttagcacggctgggagatttccctgatgttgcccagatggctagtggcatgtctcctaacacctgacctctgtcctttctgtcaccccaggtagagcagggtgtaaaaaaatacaaactacaagtattattaggataatatgtgaaatagaagttaagcaagaaaaaaatggaatagggcagatacaaccataaggaatgtttttatgtaaatacccggcagaattttggtttcactaaaggtcttatatgaaatatatgaaatacattttaactagtggtaagactattccttttagtgaatatcctgaaagtagatagattgtcatttgacctgaaactcaaatctttcaaacaattcttacatccacccacaaggccgcttgattagtgtagatcacacaggtttttggtgagaatgtctccccagccattgggcacttcaggatggggacggtgcctcaaaaatcacatcataagtcatatcacttttagtgcagacctagacacatacaattgatgaacaaatgccttttacttggttgaggaatgaatagaactctcactacagtcagaag

SEQ ID NO: 2051 - DNA, 4001 bp, Homo sapiens
ggcgcatgcctgtaatcccagctactccagaggctgaggcaagagaatcgcttgaacccgtgaggcagaggttgcaatgagacaagatctcgccattgcactccagcctgggcaacaggagtgaaactctgtctcaaaaaaaacaaaaacaaaaacaaaaaggaaaggtgcccagcctcaccaagaaactagagaaaaatgaatttaaacaatggtacagtaccttttatcaaaaaaatagtaataataataaaagaggccaggcgcagtgactcacgcctgtaatcccagcactttgggaggccgaggcgggcggatcaccaggtcaggggatcaagatcatcctggctaacatggtgaaaccccgtctctactaaaaatacaaaaaattagccgggcgtggtggtgggcgcctgtagtcccagctactcgggaggctgaggcaggggaatggcgtgaacccggggaacggagattgcagtgagccgagattgtgccactgcactccagcctgggagacagagcaagactccgcctcaaaaaaaataataataataataattaaagattggtgatattcagtattggcaggagtgaaactgttagagccttttggtgagcaagttaccagtagcaatcaaatagtaaaattgagaactcaggagttctaattctctaaaatctttttcttttcttttttttttttttagacggagtttcgctcttatcgcccaggctggagtgaaatggcgcaatcttggctcaccgcaacctctgcctcctgggttcaagcgattctcctgccccagcctcctcagcaggggattataggcgcgcgccaccatgcccgactaatttttgtatttttagtagagacaggttttcaccatgttggccaggctagtcttgaactcctcatctcaggtgatcggtccgccttggcctcccaaagtgatgggattacaggggtgagccaccgaggccagcctataattctataaaatctttcttacagaaatagtcacacgggatgcatgtacaaagcggcactatctgtaatactcaaaaacaggaggcaatttttaaaaacctatcagtaaaggcataaataatttttaaaatggtatactcatgctgtggaatactatgcagccattaaaaagaattctgtagactttatttattgacaaggatgcaagtcacagaacaactacagtttcatcttgttagtacaacaaacaggacaataacatagatttaaattcaaatgtaaatatatgtgggtacgcacacaaaaaatctaaaaggaaacatggagcaaaaagcctggaattttcaggttttactttaaaatttctctaatgacaaaaatctttaaaacaagcacgaataacttttttgacttttagaaaccatttttaaaaattaaatactgggaggtcaaaaaggaaaaaaaaatcagtcacgtaacaaacgtaacttcaaccacgcttaacaatgtaatggaactaatttttaaagcaaatgtggcaaatggctaaaaaaatactgaccagttcttaacagtttttaactccacgcagttacgccagaggtagcacactttaagctatgcacatacaattttatttacagagccatgctacaattgaggtatacgaaatttagtttatcacttcataaaataaattattcttaaaagttacacgagacaaaaatactaaccagggtctcttgttccgaagctggaatctgtgaggtggttacagcaccatcagtaggtacagacatgttggtattgcacatttgcctacaaggaaaaaaaagacacgatgaaaactggaaatcatgaaacatctgtggaaaatacatcatatataaagaacataaacaacagttaaaactaaagctacaagcaagtcggtgcttacctggatcagcagagaaaaagtggcgtgcgtccgtgcccacaggtctaccctccaatcgccactgaacacagctgggaaaatgcatggtttaaatagccccagctggagacaagtcaggacttaactccttttactgcagtttcggaacgtgtctgaacttgaccagctcaagaggaaaagctgagtcaacctgcccactgaaccggcccaatcccgcccagactacgcgcagcgttcacactagtgacccgacaggcacctgcgatcatccggacctcccgcgccgaagcggccccgcagcccccggcccccgtgacctttaccctgaactcccgcggagacctccgaaccacccccacccccaccgccgcgagagccgtccgaaatcccgccctcctccctggcggcgactgcctagccccagtccaacaaaacctccgcaaagccacgtgccccatgccccgcgccccgcgccccgagcccccagccacgaaccgcacaaaggctgcgaacgggcagaggctgggaaccagcgatagaggggacaccgtcagagcccagacccaaaagtgaccgctcgctgccgggccagtacctgctcctcaccatccggggttttcgcgcttggagtcgggggtccctcaagactccccagtttccttcacggggcgcgcggaagcacgacgccctgggcctcggggatcattccactctccgggccagggcactgggcgctcgtacgcactaatccggggagggacggtgctcctggctgcgaaagcagcaggatctcggtcagaggggtcgcggccgcccctcgggctcggcttcttgctccatctttccgacacacagggccacacaggccccagaagcagccaagctcgccgcggtgcctcggtgcgcgccccctaccgcccgaggggagcgcgcgggtcgtcgcggcgcatccgggcatttgtgcgcgcgcacacaaccggccccgcttccgccaattgggtccggggctcggccgcaccacctccgggatgatggagtggggggtgtcgccccgcgggcgcggcgggctgtgaggcggggtgggggtgttggccgcgagctgagagggtggggctcggcctggcgcggagccagcaaggtttggcgctgtgacactcctttagccgttgcgctatgtttgtatttcttgtgtttacacttcccgcccgcggtggaaactgcgacaaatgcggatctccgtgtcgctgttaccaaaaagaaaccaaaattaacagctgtttaatatattaagcccactccaccagccgctggagttgtacccaaatgagttattttaaggcctgtttttaaaaaagattaaaaatagcacttaaggcaggcttatacaccggtgcatacagctgttctggttggagaacgaagatgctggttaccgttggcggggaggggagcggttactctgcgcttttagaatgtttgggtttggctgggcgcggtggctcacgcttgtaatcccatcactttgggtaggccgaggcgggtggatcacttgaggtcaggagttcaagaccaacctggccaacatgggaaacgccgtctctactaaaaactacaaaaattagtcgggcgtggtggcggtcacctgtaatcccagctactctactccggaggctgaggcaggacaatcctgtgaacccgggaggcagaggctgcagtgagccaagatcatgccattgcactccagcctgggcgacagggcaagactctcaaaaaaacaaaaacaaagtttgggtttgttaatctacacattcattatcattaaaatatatacttatatattatgcactcattctgactcacctactttcccacagagatgtggcaaaaacgtttttgatgcggtctcataaattgaggacataaagaattgagttagctaaacccaaaaacacagccattgcaaagaaggaacacgtttcttctctggccagtaagtgattagctccttgtgaacaaggacctttttttataaagttatatccttcccttctgcagcttttttttttttat

SEQ ID NO: 2052 - DNA, 4001 bp, Homo sapiens
gcccgactaatttttgtatttttagtagagacaggttttcaccatgttggccaggctagtcttgaactcctcatctcaggtgatcggtccgccttggcctcccaaagtgatgggattacaggggtgagccaccgaggccagcctataattctataaaatctttcttacagaaatagtcacacgggatgcatgtacaaagcggcactatctgtaatactcaaaaacaggaggcaatttttaaaaacctatcagtaaaggcataaataatttttaaaatggtatactcatgctgtggaatactatgcagccattaaaaagaattctgtagactttatttattgacaaggatgcaagtcacagaacaactacagtttcatcttgttagtacaacaaacaggacaataacatagatttaaattcaaatgtaaatatatgtgggtacgcacacaaaaaatctaaaaggaaacatggagcaaaaagcctggaattttcaggttttactttaaaatttctctaatgacaaaaatctttaaaacaagcacgaataacttttttgacttttagaaaccatttttaaaaattaaatactgggaggtcaaaaaggaaaaaaaaatcagtcacgtaacaaacgtaacttcaaccacgcttaacaatgtaatggaactaatttttaaagcaaatgtggcaaatggctaaaaaaatactgaccagttcttaacagtttttaactccacgcagttacgccagaggtagcacactttaagctatgcacatacaattttatttacagagccatgctacaattgaggtatacgaaatttagtttatcacttcataaaataaattattcttaaaagttacacgagacaaaaatactaaccagggtctcttgttccgaagctggaatctgtgaggtggttacagcaccatcagtaggtacagacatgttggtattgcacatttgcctacaaggaaaaaaaagacacgatgaaaactggaaatcatgaaacatctgtggaaaatacatcatatataaagaacataaacaacagttaaaactaaagctacaagcaagtcggtgcttacctggatcagcagagaaaaagtggcgtgcgtccgtgcccacaggtctaccctccaatcgccactgaacacagctgggaaaatgcatggtttaaatagccccagctggagacaagtcaggacttaactccttttactgcagtttcggaacgtgtctgaacttgaccagctcaagaggaaaagctgagtcaacctgcccactgaaccggcccaatcccgcccagactacgcgcagcgttcacactagtgacccgacaggcacctgcgatcatccggacctcccgcgccgaagcggccccgcagcccccggcccccgtgacctttaccctgaactcccgcggagacctccgaaccacccccacccccaccgccgcgagagccgtccgaaatcccgccctcctccctggcggcgactgcctagccccagtccaacaaaacctccgcaaagccacgtgccccatgccccgcgccccgcgccccgagcccccagccacgaaccgcacaaaggctgcgaacgggcagaggctgggaaccagcgatagaggggacaccgtcagagcccagacccaaaagtgaccgctcgctgccgggccagtacctgctcctcaccatccggggttttcgcgcttggagtcgggggtccctcaagactccccagtttccttcacggggcgcgcggaagcacgacgccctgggcctcggggatcattccactctccgggccagggcactgggcgctcgtacgcactaatccggggagggacggtgctcctggctgcgaaagcagcaggatctcggtcagaggggtcgcggccgcccctcgggctcggcttcttgctccatctttccgacacacagggccacacaggccccagaagcagccaagctcgccgcggtgcctcggtgcgcgccccctaccgcccgaggggagcgcgcgggtcgtcgcggcgcatccgggcatttgtgcgcgcgcacacaaccggccccgcttccgccaattgggtccggggctcggccgcaccacctccgggatgatggagtggggggtgtcgccccgcgggcgcggcgggctgtgaggcggggtgggggtgttggccgcgagctgagagggtggggctcggcctggcgcggagccagcaaggtttggcgctgtgacactcctttagccgttgcgctatgtttgtatttcttgtgtttacacttcccgcccgcggtggaaactgcgacaaatgcggatctccgtgtcgctgttaccaaaaagaaaccaaaattaacagctgtttaatatattaagcccactccaccagccgctggagttgtacccaaatgagttattttaaggcctgtttttaaaaaagattaaaaatagcacttaaggcaggcttatacaccggtgcatacagctgttctggttggagaacgaagatgctggttaccgttggcggggaggggagcggttactctgcgcttttagaatgtttgggtttggctgggcgcggtggctcacgcttgtaatcccatcactttgggtaggccgaggcgggtggatcacttgaggtcaggagttcaagaccaacctggccaacatgggaaacgccgtctctactaaaaactacaaaaattagtcgggcgtggtggcggtcacctgtaatcccagctactctactccggaggctgaggcaggacaatcctgtgaacccgggaggcagaggctgcagtgagccaagatcatgccattgcactccagcctgggcgacagggcaagactctcaaaaaaacaaaaacaaagtttgggtttgttaatctacacattcattatcattaaaatatatacttatatattatgcactcattctgactcacctactttcccacagagatgtggcaaaaacgtttttgatgcggtctcataaattgaggacataaagaattgagttagctaaacccaaaaacacagccattgcaaagaaggaacacgtttcttctctggccagtaagtgattagctccttgtgaacaaggacctttttttataaagttatatccttcccttctgcagcttttttttttttataaagttatatccttcccttctcccgcttcccagcctaccagaaaggaaacttccttaaacatagtggtcactcagttgatttaagttgattgccaatattattaacttaagagatttaatatgtggcttttaaaaagataatctcatcttcatcagatcatatacagtggggtttctaatagactcagtgcttgaccctggatgaaagaaaatctcaagcagtgagaaaatgtaagcatgaaaagataagtgataggctgcgcacggtggctcacgcttgtaatcccagcactttgggaggctgaggtgggtggatcacgaggttaggagttcgagaccagcctggccaagatggtgaaaccttgtctctactaaaaatacaaaaattagccgggccccgtggcgggcgcctgtaatcctagccacttgggaggctgaggcagaagaatcgcttgatctcgggaggcagaggttgcagtgagcggagatcgcgccactgcagtccagcctgggtgacagagcaagactccatctcagaagaaaaaaaaaaaaaaagagataagtgatagaggttgatatttgttaaatatcaagtgaacgaatgggtttgtgctataaaagttcagagacagaattaattgcttagtaaatgctggaggcagttcacaaaggcctcagagatcacacatattttgtgtcttgaaagatggtgagacttaaataaaagcagagaatattccaggcacaagaaaattatcaaaaaatacagaaaggaaaatataagaggactgtttgagatacaataaataaatccgtttgacttgcatgaaagtcaagaagaagtt

SEQ ID NO: 2053 - DNA, 4001 bp, Homo sapiens
ggggggtcccctgtgtgtgtgtgtgggggggtcccctctggggagtctgaggccaggactggcaacgatggcgaagagggcctccaggtagacaggagggtgcgcaggtcctggagggcaaagcactcctgtcccgctgctgtcacctgcctggaggagccgcccgcccctggaggtggaggggtggcctccccgccaccctcggctgcctaccgcgccctcccttcgggctccgggaggcgccccctcctaccgggcacacagtcccctgacaccctgaaaagggcgccggccccttctcgacacactcggcctgggtggcgggggcggcgtttctggcttcggtctgctggagcggaacgccccgggcctcggttcggggatgcaccgacccgccgggcagaggcagcgagccggggctgaatcactccgcgggggcaggggcggccccagaagagccgtcggcctcggaggctcccggcgccggcgttcccggccgaccccccccagacctccatccgcccgcggccccgctcggccgagaagggaggcggccgctcccgggacagccgggcaccgcccacggccctcggggcgactctgccccccagcgccacgccccttcccccggggaggctccgccgggggcgctggggggcgactgtggcttcgcggggacccggaacggaggctgcggctgcggggagacctgcgcccgccccgcggacaccacccgccccgcaccggctctgccccgaccttctcggaaaacagcttcgctcgacatcaccgcgtgactcggcccgcggcgggggcgggggcgggggcgggggccgcgccgaggggaagcgggacccaggcccgggccagcccggccacggctctccgggaggcgcgcgtcactcgggtccccgcgcatctgcgaaccccggaactggcgactgcgaggctcgcgcagggcgggttcggccgcggtgccctcggcgccctgggcttcgcgtgggagcggcggcggctcccgaggggcagtcgcggtcggcgccgctctcggcggccacgcttgagtcaaaaaaaaaaaaaaaaaaaaaaagtcctcggccgccaccgcgggtggggggggggggggtcgcccagcgcagcgcgcgccgcggccaagggcggcctgaccttcacggggcaggggcggggggcccggccggagccacactcggcccggctcacaggtgcccgcccgcggctccccgagacggaagtggcccccgctgcggtccgcgcccgatccccgaaaccgccgctccctcccgcggccgtcccttcccgctctggcccggggcggcctcggggcgcgcaactcccggagcctgccaggaagggcccgaggaccgacccccgcctgcccccgggatggggtcgcgggaccggcggcccccgaggctcggacacgcgcggagccgggacccacccggccgcgctgcaggcgcgcctcccccgggcgtcctccgggccgggaaccgggacgccgcgggctcttttgttctagaaccgggggcgggggacagcgggcaccggactgggcctggagagcggcccccggagcccctgccccgcgcccgcccccggccgcgcccccgcacgctcggccggcccgggacgggaggggacgcgaggggagggggccgggccggggtcgcgccgcgcacactcacctccccttccagctgcaccggtcgctggagtactgcgcgcccgcgccgcccagcagcccggccaggagcaggagcagcagcgggagcggcggcgggggcgggcccggggcggggggtcgcggccacggctgccccgcgcgcccccaggccgcccgcgccgcgccccgcatgctctggcgccggctccgccgcccggccccgcgtccgcgacccccggagcagaccccggagccggcgagccgggcgggggcggggcgggcttcgagtccgggtggtcacgtcgcgcgccccccgcgtcctccgcgcggccgcccgcccatcccggcccgctggagccgcgcgcagagctccgcgcccgccgccgccgccgagcctctgaagttggcgagtccgagtccgcccggccgggctcagctggggggtggggcccacccgccgccccgccccgcccccgaccccgcccccgaccccgccccgcgccggaaactcctcccggggcgcccggccggacgcgcagacaccgagtcagcagcgaatcgggggcgcgggcgccggggcggggggcgctgcaggaggagggggccgcgccgggcggcgagcggggtccggagggaagagcccggcctggaaagcggagtccggggccggaggggttgcaaggcgagggcggggcggaaacccgagacccccaagtagtggccgacgcgagccgcggtcgccccccgcagacccccgcgaggcggtgccggggccgcatcctgcgccccatcctgcgccccatcctgcgggcagccccggcgcggagcggtaaaggaggctcccggccccgccggttctgggtcccccgcgcctcgccagcgggcggtgatcaggggcgatccgggcgccccgcgttccgcagagttggtgcctcgggagttcccggctccctcctgaccgggggggaggcccggcggtgagcccggcttccctccctcctcccggaggacgtgcagccgccgcgccggggcctctgccgagcgctgcccactcctcgctccggatacgcggggccgggtggttcttggggtggggacgtcctgcgcatggtgggatgttggcagcaccctggcccccgcactctgggtatcagtagcaacccccgccccagctttgacaacctaaactctctgcagatttggccaaatcccgcccccaccccgtgcccgcggggcagaatcacctgcggagcgtcctgctcgagtgtgttcctcggagtcggcgccttccccaggtggtcaccgcggccaccacgtgcctgacccagtgggggggacagcggagacccccgcccggactggggaggccctagagactcaggccagagaaggggagccagagggtgccgagggccccccaggcaggagagggcggagctggcccgcccggcggtccccgctgcgatggcaaagctggcttctgtgtgctgcgggtcagtggccctgcccgagacgcctggtgtcagttccagagccgagcgcagcatccagcggtggggaagcttggccttgtccccttttccagccaagataccttccaggaggacttgcgaacgacctgtgcaagtctgaataactgggttgtgactaccagaggaggcggggagagggctttgaaaattgtgagtctgcagggacggaagtcaccggcaaaggcaggtggagcccagcccccagcccaggaaagctgggacaagggtgagggtctgaagaactggaaggcgatgacagtgaccactgaaggtagtttcattgtaaggatctgttcagagcacccaccccatcgaaagcctggagccaggaccttgcccagcacatcaagtgacatcaccctgaggctcaaggtctggtggaggtgcatttcggagcttggagactgccccacccacccccgtctgctctaggagtgcacctccccccacccccatcactgcaggtaccagggtgcccagtggaaagggacctgctgtggaaagggacctgctgtggaaagggacctgcggcttcacacctgtgcgcagcaactgctttccatgcccaccaagcataagatagcagcccccccaggcccggtccacccttgaagggccacatggcctatcagggtccagatcatcacaccacggaagaggcagggcagtgctgggatctcttgagttatagatgcggacatggggaactcaggacctgccgtgacctgctcagggtctcagagcccctggtggctgctagaccgaaggggagaggccgcctctgg

SEQ ID NO: 2054 - DNA, 4001 bp, Homo sapiens
ctgtccaatctcctccctgaaatacagacacaggaagcttcagggtttcttcccgacagagattcagctgggcatatgtagactcaccaggcaggcccttccatgccttccctgtttgtctcattggaaatgagtgggaagcctttaccaaacatagcacttaaaatgaatgtataaaagaaatgacttgaaacaacagaaaataccacccattgcactgtgtaaatccttgcagagagaagatcctgcaagaggaaagctagtccatgaactcatttaacatttatgatgtaatgaactggcccctttgctacagtgtaggtggagaggtcatttccatcttaggttaattcaggacctgagtatgaagactagagtatgaaaatacagcattggaaccttctcttgcatttttttttcttgtggtgaaattgccttttcttttggtagaggggaagaaagtagaagtcaagaatataaaatgagaaaacaatcttcccccttacaaaatgttagaaaggccttgactgagaaggcaagttgagtggaagcatccgcacttctaaagtgcttttgacagagcactgggattggagctacagataaattgatgttcacttttccagaaaacttgtctttcagcatctttaatggtcacaaggcttaatggtcacaaggtgggaagaggggatctacttttccaggagcttcttaggtcaattgcagaggggggacatactgcttatatggtattggcaccaatattagaagtgtttcccagcacagcaagatgaacaccttccccataatgccttccacaatctgcctttctggaacaaggcattcttgtgtcctagcaattttcagatgttcccacttggaagacattctagagcacagacaatcttattactaatgaaaaaagaaagccagtatcctctctttttattctttcccctcccccacaatcttgcttcatagtggtggtgggggtggggggaagattacccagaaaaagcagaaaggagactcgaaccccacagcccttagagatattcctgtgttggatattaaccccctggtagctccacagtttcataactgtactctttacatattcatattctcgctctgatacattcgcaaacccaaggacagcatatgtcaaaaccagaaatttcaggcaacttagtaacaggacacgctaccaacaccacccttactcaacaatacccgggaaacatcgcgcgctggccagccgcggagacacagttcccaagcaacgcataaactgaagaacttcctctccctgtcagtttgtgggcagcttccctcgtatacataggacttggagtctccgtgttcacaggccacaatcaattcctcactaacagcaaactttgcgcacatttccgcgggctagtcctcagctcccaaactgtggagtctcccttccacgtccaccaatgaggagcctggaaacctctgtcgagagccaactccccactagtgccaaagccggagttcgaacaaatgccccccggtaactgcgcgcacgcactccccatccttcggtcccactctcactagaagcctctggctcccacttccagagaacctgtcccacacaagtggaaagaagagacgtgcaaaagaaggaaaaagcataaaagaaggcgaactgcatgggctgcatctactcacttaggagttctccgcgtctgtcttcattcattcaactctgccgaagtgcagttccctctgggagcccgggcgccggggtcgggtaggggtgggagagctgggcgaagggaacccggacacctcacggagggagggagcagggacaggcggccggctggacaggcaaaagggaccgcggagccgtgcgcgagccgccgggcggactggccctggccgccaatgtgcctttgtttatgtggcttgcgctgccgctgccaacatgcacctaaagtctccgcgcgtcagcgcgcgtcagcggcccgccgcccaatcgccgcgctgccgcgctccctggactcctggcccgcgctcgctttggtatatttccgacctgacgtcacgagcagggccgattttaaggtgggaaccgctctgcgttcaccttggtagccagcttgggtggtttttggtgttttttttcttttctttttttttttccgaaagaggtgtgacctctcccaggtctgcgcagcccgcagcgtcgcgacacttcactttccccgaagcccctgcgcccgcgcagcggctcggccgctcacatgtggggagggtgcaacaaaagcaccggcggaaggcaaggccggcgtggccaggtagtacgcacctggagccgcacggaatgggatgtgccttgcagcgccctaacctctcccacccaccttcgtcacccccttagcggaagagcgtacagatgtcccatgacacgagacgctcagagggctcacgcagttcgggtgggatttccctacccggttcatccccttttactcccttttcctgtcccaggcctcctcctcttctggcatatattcattctaattatctctctctctcactctctctaccccacccccaccccccacactcccatctgaaagggaatgggagtgggggtagggcttatttttctatgtttccttatttccatgcagtgcccacgttcgatggaggacgtggtgcttgcgggggggggggagaggaaggggagagggtagacagtgaccgtgacccagctctttagaaaccccaaaagtcagagtgaagcgtcgccccttttcctttcgcagacaatgcagccgagcagcaggcaacaggtgcgccttctgcagaaaggtactctgattcccaccttctgcaaactctaatactttcgatactcctctgtgcccaccaactcgtaccccttccacgagttttaagggaataaatcgatcttcgtttgaaacacaaggtctatcacagcctcaatcttagagcccagaaagactggacaagaaaagcgaagcgggtggggattgggggcagcgtctccgcaaagcgtaaggtgtgagcctacagcccagccaggagaggggcccgagctggctctgggagcgtgtcccacccccgcggccgtccaagtcgccgccgcttctgctttgcaagtcatttcccctagccacgccgagagcgcagggagctttctagcaaaggaaacgccgcagctccggagggcaagccccctccccgtctcccggccggagctgggagggcttcctagggcttctcccgcggggcttccagcggctgggccttgggagggagagttcggagccgcccccgcttttctactcgcgcagagcgtcccagccgcccctcctttctcggtgtggctcgtttccaggcagccgggacccttttgcaacttgcccccctactcgtgttctcagtaccggccgatggctccgtggaactattcgggatcccgggctgctcaaccctaatctgcagccccgcctttgcctactccctgctgcccccagctcgccggcggctggggaggcgttgccatcagatgccctgcggctgccccaggaagccgcgggctcttttgcgccgcagcctcggggaaacctacgtgaccaccttaagtttcccccagatgttgcggctgccgctgctgctgccgccgccgccgctgctcggcgatgccctagcgggcgcgagaaaaaaaataaaaccaggaagtgggtggggggggcgggttgtggtggcgggtgagggtgtgtgagtagggggatgaggaggggagggcgaagaatagcatattagcatgagctcggtagcgtcagcgccccgtgggcagaagcgattccatgcgaacgaaagggaaaaagtgagagtttggagagctggggagaaggaagggggtgggggtggcggtgacgcaggggcgcaggcattgacgcaccggccaggctgggcccaaaatagcagca

SEQ ID NO: 2055 - DNA, 4001 bp, Homo sapiens
aacttttcctgagccctcatcctgggagcactcttctgcctcagatctctgccctcacttctctccagccacaattttggaaacacagttatgccccagaagttgtcctgggcttggggtctaagtttatcctttttgctcttaggcttgtatttgaggctggaggagagatgggggttctcagagggcacagagatgggggaagggggcttcttgccagggccaagagagtgtttgtgtgggagttacacagtggcctagtgagtgaaagaggccccccatacctgattcatgcctcagggcagatggaggcctactgtccctgctatctcctctcagacataaacacatcctgctacctacttctcaggcctgtgggaggcacatggggacctaagccagggaggcctgtgcgcatacaggccctagagctgaatgcccagactatgcacatgcatccacccactgtgctctcctccactggtgcggcacccacaggataaaacctgaggacacagtgtgtgtgtgtctgtgtgtacacacaaatacacacgccagtgtcagaggcttgtctaggtgaaagtgaatgtaggctgggggtccctagaaatgtcacaactaaccctacaggtgtccgctgtcatctgcaaggttgtgcctgccacaggagacctgtttgtacaaatggtagcctgaacagtgctcactgcacaccaagaggctgcatgccctgaattcacaccttcattcctggtcctatctcccaatagaatggacactgggccttacaatgcacatgctaaacaccacggatctccataggccccagacccacgtctaggagtttgcctagagacacaatgtgaacattggcgtgtatgcatcggacagccgttgacatccaaaaatggaaaggtcagtgtagccacttctttctcacatccaaaaatcacttgggatataacaggtgaatgcagaccctttaaatagtggatgtacactcagatatttccgaattacataaataacactcatagtagacacacattttggatacccaaaagaatatacacaagtactaacttataaacacacacgaataccccacgagtataaagatacacacacacacacacacacacacacacaggcaaacaacttttggacacaaactcatatatttttacatcttttaaaaatacatatactgtaatgaacacactgagtcccttatataaacacacaggccctaacttgcagacccccggaaggacgccagcgtgaacattcagaaacagagaaaaacacagacaaactcacagatatttggactgatgcagaagtgtgtgaacagataggtgaaaaaacataacaaacacgccgcagttagacagtctctacgaaaatgcggcgcgccccctcctcctccagggtcaccctgcgtggggaccaaggcctggccgtgtcccggagtttgcacatctggagcccgtatcgcggtcctacctgtcctgctggtccgaggagtcggataatttttctctaaatccattttgatttttcaggacttgatggaatggacagggaaaagtttccacttttttgtgcctttttttttcttttttttttttttttttttttttttttggtgccaggggccgctcacaggtcggaataattcaagccttccgctcccccgccgagctggggtagctgatcactgagctgaaactaaacgttttaggtggaaaaaaagcgtccgaaggcaccgtgaaatgattaaggaactaaagagcttctcgccatgtgagatcatgtcctgttctcgccaacatcacaagatgtccccagacacgccgcgcccccagcgcgccgccccacactgccggcccggagcgaggaaagggtaggcgctgcgcggccgggcctgctcagcgcgccagacgtggcggacccggcccggccggagtagagcgggaagccgggagagcagcagtgctgctgccgcgccgccccagacttttataggggttggggggagggaaggaaggcttcagcctgcgccgggcgctagccagcgcacctacgggaaggggcagaccgaagcggagcccgggagcccgggtcttccagccgcaccttctattaagacatgcgcttgggggtcgcggccctctgcgctgtgcgcggggcctgtgacatctccatgtgcaaaccccgctgcttagacgagcgcaggccgggtttttgtttttgaagaaattaactgctcggccaagcaggtgcttttgaaaggggttgcaaaggctggcagtgttgccaggcaccgaggcgacgttccggtttactccgattcacccctagggcggcgcccgaccccagggttcccagccatccaacccccaccccaatttgttggggtcctgactattgctgggcccctgaccctagggcagcgccagatccctaaagcccccaggtcccatccagtcttctagtcccagaacccctccccacatcaagttccattctggcccagagcatggaggttaagctgtgaaatactggagatgaaatccgggcttccgctttggagcacccgggcagagcagaacatctcagtagtttctggagattggcgggagttccagacaccttaccccggcccataagtggaatcgcattgccctcgagccctgagacgttgtggagtcccagagccccaggacttgattccagagaggaaatcagatccacagagaccgagcagaggtgtggcatgtccagccctctctcttcgggccagactcaagcctcccctccctgttcccctccccagccttgagttagttcagctgctgggcctagccactgaaagcctgtggggccctgcagcggggtggtcgcaggggaaaggttctccagggcgggggagcgctccgtaggaggactcctggcccgccggacaatggcagttttggagagtgaatcgtcctcagcaagagtgttgtttgttttttggagggggtggtcacgaggctgggtcgcaacctagggggaagagcctagagctcgaggaaaggggggcccccggcggcaactggacatcacatatccactgagcagatttcgccacaatcggaaatgtggctgtggattcccgggcggcccccccaccaagtggtctgcgcagttccccagcgccgcctcctccctgcagcctgcgggcccgtgtccctaccccgagatttgatttttggccatctccgagtgctcgactctttccctccgcagcccagccccagcccaggcttcccgccctcccgcctcgcccgcgccgggaggcagcgcctgggaggagcggcctgtccgcgcctggagatcaaaagccctcccggaattgacatttcaccccgggctgggggcggggggtgttggtgttttgttgttgttgttgtttccatttagagggcttgttttgtttttgtttgttttctgtgagttttcatttttccatgggatattcttttgtttcgggtgttttgcgtgttgttttttcgtgggattgattttagcgggttttgctctgtaagtcctggtctttggggtgagttttgattttgtgtaattttgtactttgtccttgtaggctgtctttttgtgtgtcgtttgtaaggcttttccttctccgcggtgtttagatgtgttttgatttggtgtgagtgggtgtcgtctgtgtgtgtgttgccttagggaatttcgtgttgtgtgtgttttgtttccttcgatttgaattttatttttttgaactgtacgttttggtgggggatcgggttatattttcatgtgttgtctttagtttttgtgtttgtgagatgcgctggtgagagtttgcgtgtgtattttggcttttgtggggctttgggattagggaggggacatcagccgctactccgttcctgcccgcacccatgaagggcagaggattaggccaagcatca

SEQ ID NO: 2056 - DNA, 4001 bp, Homo sapiens
tagcactttgggaggccgaggccggtggatcacgaggtcaggagatcgagtccatcctggctaacatggtgaaaccccgtctctactaaaattacagaaaattagccgggcgtggtggcaggcgcctgtagtcccagctactggggagactgaggcaggagaatggcgtgaacccgagaggtggggcttgcagtgagccgagatggcaccactgcactccagtctgggccacagagcgagactgcgtctcaaaaagaaaaaaaaaaaagggaaaatatgttatacttaaactgactatatcctgaaaagttaaaaaaaaatctgaacctaaggctagtcaaccttttgtgacgctctttcctccgaaactgtagctgtcaatcggaagtgatttataaaactgcctcaaattcacatattacaaatgccaaacttttgcatgcatttggcaaggactaacttcacacagaactgggccagaaacagagtccctaaaagtttagggggtattttaaggtccaggtccaacaaaaaaatttacttaattacaatctttgtgccctacctttccactaagattcacaaatgcattgtgtcaagtgataaagaagaaaatgttacgaatcacctaacgtcatacatttaatttaaaatcaatgcaataatcttaaaaaaaattttatgctttttgttttggtttggtgaaatgacagtcataatgaacggttggatgcttaacataagattcatttcaagcatggatatgaaaaaagcacgcattcaaatattgtttataggttcttcaggttatgacatttttgttaattcttgccaatattagtacattaataccaaaatattaaataacttgtaaaattctagtttatgtaaaaatgttattttacaggtaacaaaatttcttcaggaaattaattgatttgttgtttataacatgacattgaaattgcaaacccttgtggcatcaaatttgtttgcatgaaaaattagtactaatattttgtatagtctttataactcatgattttgagatttccaagtatttccaagtacagaaagtacaaaaaaattgtatagtaaatcgaatctgtggagagaatctgtcaatttgttaaattagctgcctctttctttccttccttccttccttccttccttccctcccaccctctcttctttcttttttttttttttttttttgacacagtcttgctctgtctccaggctggagtgtagtggcgtcatctcggctcactgcaacctcggcctccagggttcaacaagggattcccctgcctcagcctcctgagtgactgggactacatgcgtgtgccaccacgcccagcaaattttttgtattttagcagagaaggggtttcaccatgttggccaggatggtctcaatctcttaacctcgtgatctgcctgcctcggcccctcaaagtgctgggattacaggcttgagccaccgcacctggcctctttttatttgtcatggtgcatttgggacagttgcatatgttatgatataatcaattcatttctcatgtatatgcataaaccacccacaaatgtgtttcatttcttaaacagaaggatacttaagattttgtgctaatttggcatgtgttggtgctacaacagtccaaggaatgcagtaggcaattagcagcaaaatatgcctgataaaaaacactcactttcttattgatatagtaggggtccaggtcctccaggggctctgacaccatctctggaggaatgtctccataaataaatggaaggttctttccagcttccaagtcactatttggctttgggccattttcgtcgtcatcttttttgtctggtttgggattctttgccttttcttctgcaatgcgtctttcaatagccgcaagagattctctggtgaagaagttgaagctgtcaggtcctggtggtacaagcactgtttgctccatcttgtcatcctgcacattttaattaccatttattctgcatatgaaattcctaaaataaaaggaatacagatattttaaagagtggactaagagatgttaatataaataaattcttgtcatgaaacatgagctagaggatttaaagtctgttttctccttaaattgaaaggtgatttctaaagaaaaaattttaacacaaatggtttctgtgttgagtttagttaagcatcacttatttattaattcttgtgctttactgatacaggaactgtgccatgagttttaaaagtggttcaaatatggccttaatcaaagtacattaggctaattaacactatatcactaatgagttattcagtctgtgacacacccagaagatggagactgtgcgtataaaggcaaaggatagctcatttaacaaggatgaggggaaaaggaattgtctctgagaggacataaaatctaaccctctaggtctgacaagtgattcctggccaagatagtcaggatagtttgcagtgaccaaccttaatgaccaatcaaatagttattgctgtcttgactgggctttaacctcttctaagatttgagacaactggaactatgtcctgctcacttcactagccatgcatggttggcttacttgaacacataaagataaagacagtccacggttggacaaatgtcatttatgtgagtaagaaggagaggaaaactaggctgtaaagaaattgctagatggaggtgggggtggaagaagatagctgtaggtgcaggagacagcaggagtctcctgtttcaagaaaaatgatcagaaagaagtcagggtgccataaactcaatagaaactaagtgtttttcttcactgaagcaataatgaaattcttgctgattctatagtcctatagtgctaaccatattatgaaggcctgaggcaaaaccgtcaaccccatacagcagagtcagacctgatctgatgccagacgccaaatcccaaatgtattgttttaaggcatatttaatatgagctcagatttcacagatattactgagccaaaatattccagagcctaagctgccacttggccatgaattttatttggagactgcattaactcattaaggtcagcaagctatggtacagttaattatagctttggtgtatatgaactacaataagaaaattgcaggcataattattttgtgagggacagagacctcaaatttcaaggaggttctcattgttgtgaggtttataaccatatttttcagagtggatgatcaaaagaagggaggactcaagtttaaatttgtacccttagtctactaagtgaagttttcagcggttcttagaacttaacctgcagttatttagtacctgcaagaataggttgtctgtaaatcaatgaaaactgaatgttctgtctacaaactctggttcccctacaaggcatcaggaaaatactaacatttattttttgcaaataaaagtttagggataacaaatatagtaacttttctcaaaagggaaataaaatattctgatgtatatatatagtttttatttttaaatagctttttgatagaaaatatatgtaaatgatataaatgcaaatatctaaaagaaaatgcagtataatatctcctttttaccttgtttccccaggcccagttccccttcctagaggcaactactactacttatctcccatatatatttccaggtattcaataggtatatgctagaacatgagtgtatgtatacatattctattttaaaatacatattcaaatggaatcttattatacaaactgttttacaccagcattttttacttaaaatgtatattagagttcatttatcttaatttttatagatttgactcgtacctattactggctacatgggtttccattgcatgttatgtgccataatttatttaaccaattccctgaatgtgagtatttgggttgtttccaatctttagctaatattgaataaagttgcaagtaatacat

SEQ ID NO: 2057 - DNA, 4001 bp, Homo sapiens
cattcctagcaagttcccaggtagtactgatgttgctggttaggagaccccactttgaaaaccactgtcctagaatttagtaggtacttagtaaattttggcttaatattgtaaatattcaaacaatataatctcaccaaaaaatgtaatctcactttaacatagattagttaataatgttaattcccatttagaggaatacaaagatatatatggtagaatcaaaactaatttaaacctcatttaattcaaattccccattttaaaatgaaaaaattaatatattttaagcttattacaacaaagaagaatcccttttagcaatagccaaaagaaacaatattaaatgcaaatcaattatagacaatttgaacactgacattgttatctgaaagatatataaactcaaagattataagtacaattaagtatgtatccatcattttttaacttatgaggaatagtctgaatgccaaactgagtaaaacctggtctgatggggctcttatctcaagctatgtctagggaaaatgcctattgacttcagtaatataaaatcaggccccgagggaccataattgtctctttaaattatttgggaaatcatgtacatgtttaatcaactaaatacagcatacaattgtaagtggtatattttcatcataaataatcaatgtgctgctgttaatatggttaatagaatgaaaagtaccttcaggggaatttattttacgatcactcattttcattcctttaatttaatttttaaaatgcaagaaattttagatactttaaaactacctgtttacctagaaagtatgtgctaagtaacctgcctaatgccagtcatcactgagagacaccaaaacaaatgattgatagttaactttccattttgctctttgagatcacgtagacagtttatgcagactttactttcctaactcatgtcatcctgtccaaggtactgaacttcacttgccaaggacacacaggaagataaaccctctcaaatgtgctacatttgtcttcaactttttaaatatccatctattttttagattagatgccatctgttgtattatcatatctggttaaatcttattaaaattcctggccaatatatcactctgctgcggcaatcttaccctgctacctctctaggcttttctgcagcattcaataaagagcctgctattttaactaattgctgaggcaggacacagtgtgagagtctaaaacagaatcagcgctatattgtttctacttttacccatagagtgaacaactgttcatatcaaacctggaatcatcccttcaagtctcctaaacacagcacagtttgagccaatgcagttaatccaccctccttcagtgctagtgtcgaatggcgcttttgctgcagtattcaccttgaaactaagtaggcaggattcattatttgttgaagtcacctaactgccagtttattcttatacgatcacaaacaatcacaacagaagacaaatacaggcatatatataactcacttacaagggaagcaaatttgcagccagagacaagggcaacgtaacagccaagaactgcagtaaatctctttgagctaatagccacctctaataatgctctcctacaacacctccaatcaaataaattgtattcagagtttaaatatcaaatcaacattcattccttgatggttacagatgatgtccgataagcaaatttgaatttatgatttatttactccttaagtgtctcaaagccaggattactggaagacttactatgcttattcaagcatgctgacagaactgtaatctcagtaatttctccctgcacctctcagcatgactgacaggcatctgccaagactgtagtacataaactgctgaaacatgcaaaaatatttacccccaaaagatgtagtaaaagctcagcttcctccagcttccataacccctgaagtgttaatctggaggaacagttccatgagtttccacaggccagcagtgtgtctcctacacttgacctagacagccttacataacgaagcaccagtgctggggagctctctgaatgtcatcaccagcaagagcaagaagtattggcagcagcaggcagccaggcaggctgggagtttgcatggaaatcatgaagtctttcttgtcttcctcttttgaaatattttggaaggcgagttaagaatagctcagaaactggtctcattctttttgtgggaagaatgaccagaagcataaaagctaagtcttccagcaagtgcaagacacctcttttggtgtttgcagtaaacctaacaagaatgaattgctatcagtaaagtcctgtaccatgacacctaaaaggaaggaaatggtaaagcaaagtaataactcaaagacagtcaccgagggcttttgtccacctttaactcattgtggtgagtagagggaaatatgtatatatgtaatgagattattattgggggtgtgagttgttttgcaggatggtaactaaaggatttgtaaagagtgtttatgttccttaaagatcttgtttgtgagcaaggtaataggatatcaaattcagaacgtggtgggttaaactggttgtatttaatgtatttcaacttctgaaaatcttatgcaactaataagaaagcagatctctgcctatggtgggttgccgataaatgtcagatgtgttaattaattacttctattgtctatactgaaaaataagatcttaattttagctttcagattttgcatataatcaatcttttagactctgaaaataatttcttataatggagcaagaggattgctgtgcttttgagataatctgtgttagacttactcctagatatctgggggataatgtgaacagcaaatttaaaacaatgtacactccatctaattttctttcaattatcccaaatgtgtgcaatgcaagttatgcttttaaaagctagaaataataaaaccagtcttctattctgattttgagtatggtgatatagtattattaataaaagatgacattatattgtttaattatatataaaattgtggtttgatatgagttgttggctaatatgtataattcctgaggtaacagaaatagagaaggaaccacacatcatttaaaaataatcttaatgttctgctcttagctgggaaacctatctgctaatgcatcacactaagtagagtgaggaaataagagaatttagatctatgagggaacacagtgatctaattccaacccattacttaactcataaggaaactgaggtagaaagaagttagatgatatgcctgacatagaggaagaggtgagtgaaaaatggttttcctgacactaacttgttattttgtcagctatactgcaatgaataattgtcttttgatactggagtaaaggcttgatgtacagtgatttttttatatcatacaaatgacagaaaaaaaaagtggagtagtactaaatatctgcttttagcagtagtctgattttggaaaaacaagttctgtactgattggaatgagaaactttcttcagttatttctcacaacagtaatgaacacattggtgcaacatttaattaaatattcaatgatgaatttgtgttctgaacattaagctatgtacaccaatttgttggctcagatccttttattttattgatgttgattatggtgctaggcttctctatcccttggagagctaatgtatgtgaaacaaacaaccctcaggaagcaaagaactggaaaatagaatgtttttaaaaaatattctgtcttattcttttcaaataaactaagccttttgtaatcaggtgtgtgtttttcattcttgcatccctgcccctagcacaatgctttctgggcctccaataagtgtttgctgaatgaatcaatggagggatgaaaagtattcataatgtgtccctccctgtataggaagtgcatagagtatggcctagtagagttatttgg

SEQ ID NO: 2058 - DNA, 4001 bp, Homo sapiens
cagaaaagatagccgggagcggtggctcacgcctctaattccagagctttgggaggccgaggcaggcggatcacctgaggttgagaattcgagaccagcctgaccaacatggagaaatctcgtctctactaataatacaaaaattagccgggcatggtggcgcatgcctgtaatcccaactactcaggaggctgaggcacgagaatggcttgaacccgggaagcggaggttgcggtgagccgagatcacgccattgcactccagcttgggtaacaagagcgaaactccaccttttaaaaaaaaagaaaaggaaaaaaaaaaagaaaagataataatctagctagaatgtatcatacaatcacaaacaatagcgttcgtgaaacgtgtaataaatggacatttacataaaaacgtcattcaaatataaccttggcaatgcgcacgttaaacttacacaatactacaagtacctctgcattgtttcctctattaaataaacagtattaataacacaattattattaggtaaataataaattagtactcaactgtgttgcttgaaatcagggtctctttactaaatcagtccctaaaaacacatattacttttttttttttttttttttgagacggggtctcactctgttgcccaccctggagtgcagtggcaggatcacagctcactgcaacctcgaactctagtacctgggactaaaggtgtgcgacaccacgtcccgctttttttacttttagtagagaggaggtctcgctatgttgcccaggctggcctgaaactcctaggctcaagagatcctcccgctttggcctcccaaagtgctaggattacacgaaagagccaccgcgcccggcctgacccaaatattgataaagatgaacacctatcaaggatagaaactcctcagatcaaaaataagaaacctgaccgggcgcggtggctcacgcctgtaatcccagcactttgggcggccgaggcggacggatcacgaagtcaagaaatcaagaccatcctggccaacatggtgaaaccccgtctctgctaaaaacacaaaaattagctgggcgtggtggcgggtgtctgtagtcccagctactcggcaggctgaaggagaatcggttgaacgcgggaggcggaggttgcactgagccgagatcgcgccactgcactccagcctagcgacagagcgagactccgtctcaaaaaaaaaaaaaaaaaaaaaaagaaaccttcaagaacatgacaactgcaacatatctgcttcattatgctagaagtgttaagtttgtgtctcaatactacatacatacaaaaaaagcatgtttagcccaaacaccattaccgcacaagagcaagattagaataaaagtaatatgaacagctctaaaagtactctctctcccatacccactcctaactgcattacagaatggtaatgtcttcaggaacagccacgttctttaaattttgcaagctgtgactatagaaacagctttcctctttcaaaaattgtaatttcagtcataaaaatatagaccaaaaaaagcaaactgcacaggtgtcaagtttgcaaaaagcaattgaaaacgcagaccaacgggacagccaaaaagttgcagacttaagtgtgctggggggtagaggagaaaagcaatgaaaataaaaaataaagaaaaagaaaaaaaaagctctaacaaaagcaatatgctaaaagagtaagagggggagagaaacttattttaaagcgactgcgagagtctcccgacctggctgctgcggaaagaacaaggccgcccaggcgggccacggacggaggaaaagagcgaatccactggcagctcgcgcagtaggaaccgcagccccggaggagcgcggctgaacggagggccggggtggggaggggaacgccgcggagcctgccccgagcccccagccgccctcaacctcaggccagtaggagcccggggagagggaggaggagatgcgcagttccggccgcccgcaccctgcgcacctcggtacccaatcgccgccgccgccgcctcttcctcctcctcgccctcgtcgtcgtcgtcttcgtcgtacaagttgtcggccagcggtggctcccgagatgggccctgcaggcccggcccattgtctccttccccagccgccgcagtcgcctgggcctcttgctccccgcctgccgccgccgcctctgcctccgcctcccgccacagcgccgccgccgccgcacccgggcagcccctggccgccgccggcacctcacgctctggggccgccccaccgggctcgcccgggctccgctcgaggccgggaccatctctccgcggcctcttgcggagcggctccccggcgggggacgacgcggcctccctgtcggcccccgccgccgagggggagccgccgggctgaagggcgagggccgcctcgtccgccatcttccaactgcctctctggccctcctccctcgcctcctctgctcccgctcgacgcgcggcactggcgcccccgcggctccggctgcgggagatttaaaccccatcacgtgacccgccccatcgccgcccccgccctctcggcgctcccgccacccacgcgggccagaccacaacactacgggtcacgtggcgggcggaggctgttgcgtctaccgctccgcctgggctggaagcgcactcggccccggcggccggcggcccttcctctttgtggcgagcgtgtagtgcagccaaattcgcccctcggccgctttctcaacttctctttcaaactgacctcaaatcactaccgccggaacagctcaagttttggtccgccctgggaatttccacgtcttcctgaagtgtacacctggcctgccttagccttgtctatatttagctaagggttaaaacacagctgaagctggctaagacttagctccctgaaatacgttggatagtcgttctgttttgttaataagtaggaagagaggcaaaaggaggcggctcctttcccactctcctcacaccgttctgacagctcctcttttgctcctttttctgctccttgcttttctccttagtcggttgcttttttcccctctctcccatcacttgtagggtggtatacattgtaaaatccttgaaggcatatgtcctcctgggaagacctttgacgtggaggtttggagatcagccgatctactttctggccccagcttggcttcaaacgtgtgtgaattccctcctccgggcctcagttttctcacgtgcagaatgggtttgttgggtcagtatgagagcatgggaaggaaatgacttggcctccatgcacatctgcccttggttaaaatttggagtccttcctttctagcgtgagctatctagccgtttctaaacttaatttttctcatgtcttaaatggtaataagtattttaaaacgtcatagatttaaatgagataaccagatgtaaaacgaggggtacctagtagttcaaaaggcttagtggaaagcccttccactttcctctctccctgaaattctggcacactgtgactccatatctaatcttaactaaggacccatataacccatggtagatctagagccagtgtttgttatggcatctgcctggagcacagcgtttctatctgtttaaaggacctctacgagtttatggtacactgtcccttaagcctagtatgggttctggccatactgcatcaattacctgcgtgactttaggcaaccaacttaaagctgtttcttcatccttaaaataaaaaataaaaagctggaaatatatcgctaaggtcctatctacatccaaaagtcttatttcatctggtcaccactattcatttctgaaagtaatcatctccagtcctagaagccttaaaaccatctttggttgcgtgggggtcaaggggagggagagcattaggacaaatagctaatgcatgcgggacttaaaacctggctgggcgcggtggctgc

SEQ ID NO: 2059 - DNA, 4001 bp, Homo sapiens
caattattattaggtaaataataaattagtactcaactgtgttgcttgaaatcagggtctctttactaaatcagtccctaaaaacacatattacttttttttttttttttttttgagacggggtctcactctgttgcccaccctggagtgcagtggcaggatcacagctcactgcaacctcgaactctagtacctgggactaaaggtgtgcgacaccacgtcccgctttttttacttttagtagagaggaggtctcgctatgttgcccaggctggcctgaaactcctaggctcaagagatcctcccgctttggcctcccaaagtgctaggattacacgaaagagccaccgcgcccggcctgacccaaatattgataaagatgaacacctatcaaggatagaaactcctcagatcaaaaataagaaacctgaccgggcgcggtggctcacgcctgtaatcccagcactttgggcggccgaggcggacggatcacgaagtcaagaaatcaagaccatcctggccaacatggtgaaaccccgtctctgctaaaaacacaaaaattagctgggcgtggtggcgggtgtctgtagtcccagctactcggcaggctgaaggagaatcggttgaacgcgggaggcggaggttgcactgagccgagatcgcgccactgcactccagcctagcgacagagcgagactccgtctcaaaaaaaaaaaaaaaaaaaaaaagaaaccttcaagaacatgacaactgcaacatatctgcttcattatgctagaagtgttaagtttgtgtctcaatactacatacatacaaaaaaagcatgtttagcccaaacaccattaccgcacaagagcaagattagaataaaagtaatatgaacagctctaaaagtactctctctcccatacccactcctaactgcattacagaatggtaatgtcttcaggaacagccacgttctttaaattttgcaagctgtgactatagaaacagctttcctctttcaaaaattgtaatttcagtcataaaaatatagaccaaaaaaagcaaactgcacaggtgtcaagtttgcaaaaagcaattgaaaacgcagaccaacgggacagccaaaaagttgcagacttaagtgtgctggggggtagaggagaaaagcaatgaaaataaaaaataaagaaaaagaaaaaaaaagctctaacaaaagcaatatgctaaaagagtaagagggggagagaaacttattttaaagcgactgcgagagtctcccgacctggctgctgcggaaagaacaaggccgcccaggcgggccacggacggaggaaaagagcgaatccactggcagctcgcgcagtaggaaccgcagccccggaggagcgcggctgaacggagggccggggtggggaggggaacgccgcggagcctgccccgagcccccagccgccctcaacctcaggccagtaggagcccggggagagggaggaggagatgcgcagttccggccgcccgcaccctgcgcacctcggtacccaatcgccgccgccgccgcctcttcctcctcctcgccctcgtcgtcgtcgtcttcgtcgtacaagttgtcggccagcggtggctcccgagatgggccctgcaggcccggcccattgtctccttccccagccgccgcagtcgcctgggcctcttgctccccgcctgccgccgccgcctctgcctccgcctcccgccacagcgccgccgccgccgcacccgggcagcccctggccgccgccggcacctcacgctctggggccgccccaccgggctcgcccgggctccgctcgaggccgggaccatctctccgcggcctcttgcggagcggctccccggcgggggacgacgcggcctccctgtcggcccccgccgccgagggggagccgccgggctgaagggcgagggccgcctcgtccgccatcttccaactgcctctctggccctcctccctcgcctcctctgctcccgctcgacgcgcggcactggcgcccccgcggctccggctgcgggagatttaaaccccatcacgtgacccgccccatcgccgcccccgccctctcggcgctcccgccacccacgcgggccagaccacaacactacgggtcacgtggcgggcggaggctgttgcgtctaccgctccgcctgggctggaagcgcactcggccccggcggccggcggcccttcctctttgtggcgagcgtgtagtgcagccaaattcgcccctcggccgctttctcaacttctctttcaaactgacctcaaatcactaccgccggaacagctcaagttttggtccgccctgggaatttccacgtcttcctgaagtgtacacctggcctgccttagccttgtctatatttagctaagggttaaaacacagctgaagctggctaagacttagctccctgaaatacgttggatagtcgttctgttttgttaataagtaggaagagaggcaaaaggaggcggctcctttcccactctcctcacaccgttctgacagctcctcttttgctcctttttctgctccttgcttttctccttagtcggttgcttttttcccctctctcccatcacttgtagggtggtatacattgtaaaatccttgaaggcatatgtcctcctgggaagacctttgacgtggaggtttggagatcagccgatctactttctggccccagcttggcttcaaacgtgtgtgaattccctcctccgggcctcagttttctcacgtgcagaatgggtttgttgggtcagtatgagagcatgggaaggaaatgacttggcctccatgcacatctgcccttggttaaaatttggagtccttcctttctagcgtgagctatctagccgtttctaaacttaatttttctcatgtcttaaatggtaataagtattttaaaacgtcatagatttaaatgagataaccagatgtaaaacgaggggtacctagtagttcaaaaggcttagtggaaagcccttccactttcctctctccctgaaattctggcacactgtgactccatatctaatcttaactaaggacccatataacccatggtagatctagagccagtgtttgttatggcatctgcctggagcacagcgtttctatctgtttaaaggacctctacgagtttatggtacactgtcccttaagcctagtatgggttctggccatactgcatcaattacctgcgtgactttaggcaaccaacttaaagctgtttcttcatccttaaaataaaaaataaaaagctggaaatatatcgctaaggtcctatctacatccaaaagtcttatttcatctggtcaccactattcatttctgaaagtaatcatctccagtcctagaagccttaaaaccatctttggttgcgtgggggtcaaggggagggagagcattaggacaaatagctaatgcatgcgggacttaaaacctggctgggcgcggtggctgctgcctgtaatcccagcactttgggaggccgaggcggacagatcacctgaagtcggaagttcgagaccagcctgaccaacatggagaaaccccgtctctactaaaaatacaaaattagccgggcgtggtggcacatgcctgtaatcccagctactcagaaggctgaggcaggagaatcgcttgaacccagcaggcagaggttgcggtgagccgagatcgcaccattgcacaccagcctgggcagcaagagcgaaactccgtctcaaaaaaaaatataaataaaacctagatgaggggttgattggtgcagcaaaccaccatggctcacctataagtatgtaacaaacctacacattctgcacctgtatcctggaacttaaattaaaaaaaaaatctttgaagcgttccttcataccaatccctctgaaatccatctgaccaatcaatgaccaaatcctgttgtccttcctttcttgctacactcctcccaattcctgactaggcaccacactc

SEQ ID NO: 2060 - DNA, 4001 bp, Homo sapiens
cgccgcctcccgctccttgcgggcgtcctcgatgaggctctgcctgcgcccaatgaaccgcggggactgtggggacaaggggcacccatgcctcctccacctgctgagacccggggacctccacccacagctggtcccacagtcgggcagcgctgatggcacacagaggcaggggatgagagcacgtttttgagcgcctactgtgtgcctgctggggcagatgctagccgaggtgcctgcgggcattgcacgcccttcccgatgggggcagcccagtcagaagcagtggtggtgggggaggagtgggggctgggaaggtgctcgcctgctccccactctgtggcgagcagacagacagagacgctgtgtcactcatccccaggccaggcgctaactggattagtgatgggaagagggcgatgtcttgatggacagtggcatcggctgccggggagggaacggcagctcaggaaggagctgcccccacagggccccagtgaacaacccccctaccctcctggctgccgcacaggggaccctttctcacactcccatcaggacacctgtcctcgggccctgcccctctgtgccaccccgcaggcgcccgctcctggctgccttgtcatccctccaccctttgtcatagctctgggcgcaggtgtctctccctgggctcagcgcctctgacccctcgatcccagagccgtcccaggcctggacagagggggacttggcagacacctggggctcatcccttggagctgaactcccaagaaggctctgggccccttgtaagagaagaatcagcttcatcctgagcttccagggttgtggaacatgaaggggagcagcagaagcccctcccagagtcccctcttacttacccttggggtgggggtgtaggatgcagctggggctgcagttccaggccacggagagcctgtgaggctgggccccggggcgccctggggaggggatgcctgatggggagcctggtgggggagggtaggggagggcgggggaggacgggggagggcgccctgtgtccctgagaaggtacctggaaatgacactgctacaactcacaccacatttcaatcaaggtccataaataaaaacccattttaaatgtgccagggagcccaaggttctgagtgcccaaggaggcaccgaagacccctcctgtgggctgaaaagctcccgattatccagcctggcccacacagtcccctgtacacagggcttccgagtgcaggtcacagggaacacagactccatggtgaatgaatgaatgaatgaatgaatgaatgagggaaataagggaggaacaggccaatgggaatcaccccagagcccagataccctttgaattttgccccctatttgcccaggaccccccaccatgagctgctgctagagcctgggaagggccttggggctgcctccccaagcaggcaggctggttggggtgctgactagggcagctggggcagagggaggcaggggcaggtgggagtagggtgggggctgggtgcagcagccggggacctctggccatcttggattttttggatggatttgtttccacattccgatcgttaagattcaagatgaaacaagacacagagacccacacgacccccgagagaggtcggcctaagaggggcacacacagggacaggcatcacctcaccctcccccaacagggactcaaacaccaggcacaggggatgccgctgtgcccaggcctccacatccacgccgcgtcccaggggtttgcatggaccctgagcctggggctgccagccaggctggggagtagcagaggcagctggcaccagccctgggctccggtccactgcggccgccgggcacctacctgccctcttaccatgatggcctctgcctgcttggcgtccagctcagacacggccctgcggaagcccttggcctgtggcgtggtggcgtcgggggtgggcatggctcagtgtggaggtccgggctccgtctccacagccctggcccagcagcctcttataagctgagctgacgtcaaagccccctctgggtcccccaccttcccctccttacatcccccacccctgcctgctgtgcctgatggaggcgggggtgggtgaggaaggagggaggcgcaggagaaagggctcgtccgtggaatctaattgccttcactccccagccctgtctgaatcatcctcagcccgcgggcttgcggggaccaggggctcgtgctctgcggggggctgagacagccagggtccccttggccccacagccctcaagagagcacacagggaggggctttctggcagcccaggggcacacttttaatgaacaccagaacctcgtggcagaccgacccagaaagccccaagacggggaatccagcctccagcctcagatgtcaggaggcaatttgtttgcttctccagaagattccaggccgtgtgtctcatagacgtggttcctaggagtgccatctgcccacagcccccgggccctgcaggtgtggcccttgcagcggcttcccaagctcgccccgtggggtccagaatgtcccaggagggcccacctgtccagtgtggaggaccctgggaggctgaagaagacatctctaaggagacgccacgcgtttccaaatggctgccacctcctgcatcacagtccccaccagggttgccagggcgaccagggccagggacggcttccacccaccccactcagcccctctatggcccactgctagctcctggcttccctcggggtcctgtggccccttctttaaagagcacgcacgtccctcagtgctgagggccctgatgccttccccttggagagacctttgcagtttctcctctaccccaccaggccccgggttgagggtgaccctggggtgacctgagaactcccttgaggacaaccccagcctagagcctcccccaagttccatgtccgccccgcaggcacccgcatccagcccacgcccactggcacctcctgctcccagccgctgccccacccagggagagtgatgcccctgcccagggtggcttctggcccttctggtggaaggggaggcctccccatccctctggggtcagcagagatggccagagcctgccttgacaatgctggactgtacagagggaaggacgtggccccagagtgcatggcctgcggctgaacgctgccaccgctgtccctcctggagaagaaccgtttccgacagggcttggggcttcctgtatctgctgggctttctggtgttggcagcccaagatgacaccctgggcccagcaggagccagaagccctagacgctccctgacttctcgaaggcctaccccggctggtcactgtggcagccagagctggcatctctcagggcccactctgctcctgtcagctgtgggactccccgctccccgttctctcttcaacaatagcccctgggacctttcctaaaactgcttcagccatggcatccctgtcccacacccctccgtggctcctcgctgccctctgcaggcaggctgagtgctcagtcaaagcaaagggaagaccccccaacccttcccacttcctggcccagaaggatttggggctccgtgatccccggtttgcagtgtcattcctcacccacctcttatccgggtgaactcctatgcatcccacaaaacccagttccgtcgctgctcactctgcaatgcctgccctttcttgccacgatattaatgcccctcccttgcgctcctctggaacatccctgggggcagggaagcctaccgctcggcccctgctgtctctcagcacccagtgcagaccctgtcctctctcggagatgctatgcccctccacagtgttccccaaaggcctccacctcctgtgggtcctgcccacagtaggtctgggtgcctgctcagaagggcgttggagggatttgcctccaagacctcagcctgaaggctcagcctctggcct

SEQ ID NO: 2061 - RNA, 19 nt, Artificial Sequence
  source: /note="Description of Artificial Sequence: Synthetic oligonucleotide"
  source: /note="Sense strand starting at position 2020 of SEQ ID NO: 14"
ggcacggaguuguugagau

SEQ ID NO: 2062 - RNA, 19 nt, Artificial Sequence
  source: /note="Description of Artificial Sequence: Synthetic oligonucleotide"
  source: /note="Antisense strand to SEQ ID NO: 2061"
aucucaacaacuccgugcc

SEQ ID NO: 2063 - RNA, 19 nt, Artificial Sequence
  source: /note="Description of Artificial Sequence: Synthetic oligonucleotide"
  source: /note="Sense strand starting at position 2020 of SEQ ID NO: 141"
aaacguuuauucugagcac

SEQ ID NO: 2064 - RNA, 19 nt, Artificial Sequence
  source: /note="Description of Artificial Sequence: Synthetic oligonucleotide"
  source: /note="Antisense strand to SEQ ID NO: 2063"
gugcucagaauaaacguuu

SEQ ID NO: 2065 - RNA, 19 nt, Artificial Sequence
  source: /note="Description of Artificial Sequence: Synthetic oligonucleotide"
  source: /note="Sense strand starting at position 2020 of SEQ ID NO: 194"
uguugagcuucuuagugua

SEQ ID NO: 2066 - RNA, 19 nt, Artificial Sequence
  source: /note="Description of Artificial Sequence: Synthetic oligonucleotide"
  source: /note="Antisense strand to SEQ ID NO: 2065"
uacacuaagaagcucaaca

SEQ ID NO: 2067 - RNA, 19 nt, Artificial Sequence
  source: /note="Description of Artificial Sequence: Synthetic oligonucleotide"
  source: /note="Sense strand starting at position 2020 of SEQ ID NO: 196"
uugagcuucuuaguguacu

SEQ ID NO: 2068 - RNA, 19 nt, Artificial Sequence
  source: /note="Description of Artificial Sequence: Synthetic oligonucleotide"
  source: /note="Antisense strand to SEQ ID NO: 2067"
aguacacuaagaagcucaa

SEQ ID NO: 2069 - RNA, 19 nt, Artificial Sequence
  source: /note="Description of Artificial Sequence: Synthetic oligonucleotide"
  source: /note="Sense strand starting at position 2020 of SEQ ID NO: 592"
ugccacuucuucuggaagu

SEQ ID NO: 2070 - RNA, 19 nt, Artificial Sequence
  source: /note="Description of Artificial Sequence: Synthetic oligonucleotide"
  source: /note="Antisense strand to SEQ ID NO: 2069"
acuuccagaagaaguggca

SEQ ID NO: 2071 - RNA, 19 nt, Artificial Sequence
  source: /note="Description of Artificial Sequence: Synthetic oligonucleotide"
  source: /note="Sense strand starting at position 2020 of SEQ ID NO: 767"
cccaguugucaaggagcuu

SEQ ID NO: 2072 - RNA, 19 nt, Artificial Sequence
  source: /note="Description of Artificial Sequence: Synthetic oligonucleotide"
  source: /note="Antisense strand to SEQ ID NO: 2071"
aagcuccuugacaacuggg

SEQ ID NO: 2073 - RNA, 19 nt, Artificial Sequence
  source: /note="Description of Artificial Sequence: Synthetic oligonucleotide"
  source: /note="Sense strand starting at position 2020 of SEQ ID NO: 768"
ccaguugucaaggagcuuu

SEQ ID NO: 2074 - RNA, 19 nt, Artificial Sequence
  source: /note="Description of Artificial Sequence: Synthetic oligonucleotide"
  source: /note="Antisense strand to SEQ ID NO: 2073"
aaagcuccuugacaacugg

SEQ ID NO: 2075 - RNA, 19 nt, Artificial Sequence
  source: /note="Description of Artificial Sequence: Synthetic oligonucleotide"
  source: /note="Sense strand starting at position 2020 of SEQ ID NO: 877"
ggugcaguggccuagcauu

SEQ ID NO: 2076 - RNA, 19 nt, Artificial Sequence
  source: /note="Description of Artificial Sequence: Synthetic oligonucleotide"
  source: /note="Antisense strand to SEQ ID NO: 2075"
aaugcuaggccacugcacc

SEQ ID NO: 2077 - RNA, 19 nt, Artificial Sequence
  source: /note="Description of Artificial Sequence: Synthetic oligonucleotide"
  source: /note="Sense strand starting at position 2020 of SEQ ID NO: 993"
ugggacuagugcccaguua

SEQ ID NO: 2078 - RNA, 19 nt, Artificial Sequence
  source: /note="Description of Artificial Sequence: Synthetic oligonucleotide"
  source: /note="Antisense strand to SEQ ID NO: 2077"
uaacugggcacuaguccca

SEQ ID NO: 2079 - RNA, 19 nt, Artificial Sequence
  source: /note="Description of Artificial Sequence: Synthetic oligonucleotide"
  source: /note="Sense strand starting at position 2020 of SEQ ID NO: 1006"
caguuacguuggucuccaa

SEQ ID NO: 2080 - RNA, 19 nt, Artificial Sequence
  source: /note="Description of Artificial Sequence: Synthetic oligonucleotide"
  source: /note="Antisense strand to SEQ ID NO: 2079"
uuggagaccaacguaacug

SEQ ID NO: 2081 - RNA, 19 nt, Artificial Sequence
  source: /note="Description of Artificial Sequence: Synthetic oligonucleotide"
  source: /note="Sense strand starting at position 2020 of SEQ ID NO: 1009"
uuacguuggucuccaaagu

SEQ ID NO: 2082 - RNA, 19 nt, Artificial Sequence
  source: /note="Description of Artificial Sequence: Synthetic oligonucleotide"
  source: /note="Antisense strand to SEQ ID NO: 2081"
acuuuggagaccaacguaa

SEQ ID NO: 2083 - RNA, 19 nt, Artificial Sequence
  source: /note="Description of Artificial Sequence: Synthetic oligonucleotide"
  source: /note="Sense strand starting at position 2020 of SEQ ID NO: 1063"
gcauucuccucuccgaaga

SEQ ID NO: 2084 - RNA, 19 nt, Artificial Sequence
  source: /note="Description of Artificial Sequence: Synthetic oligonucleotide"
  source: /note="Antisense strand to SEQ ID NO: 2083"
ucuucggagaggagaaugc

SEQ ID NO: 2085 - RNA, 19 nt, Artificial Sequence
  source: /note="Description of Artificial Sequence: Synthetic oligonucleotide"
  source: /note="Sense strand starting at position 2020 of SEQ ID NO: 1156"
caauguggcucugugauca

SEQ ID NO: 2086 - RNA, 19 nt, Artificial Sequence
  source: /note="Description of Artificial Sequence: Synthetic oligonucleotide"
  source: /note="Antisense strand to SEQ ID NO: 2085"
ugaucacagagccacauug

SEQ ID NO: 2087 - RNA, 19 nt, Artificial Sequence
  source: /note="Description of Artificial Sequence: Synthetic oligonucleotide"
  source: /note="Sense strand starting at position 2020 of SEQ ID NO: 1270"
gggcccagcucaucagaua

SEQ ID NO: 2088 - RNA, 19 nt, Artificial Sequence
  source: /note="Description of Artificial Sequence: Synthetic oligonucleotide"
  source: /note="Antisense strand to SEQ ID NO: 2087"
uaucugaugagcugggccc

SEQ ID NO: 2089 - RNA, 19 nt, Artificial Sequence
  source: /note="Description of Artificial Sequence: Synthetic oligonucleotide"
  source: /note="Sense strand starting at position 2020 of SEQ ID NO: 2088"
gcucacugguccuggcaau

SEQ ID NO: 2090 - RNA, 19 nt, Artificial Sequence
  source: /note="Description of Artificial Sequence: Synthetic oligonucleotide"
  source: /note="Antisense strand to SEQ ID NO: 2089"
auugccaggaccagugagc

SEQ ID NO: 2091 - RNA, 19 nt, Artificial Sequence
  source: /note="Description of Artificial Sequence: Synthetic oligonucleotide"
  source: /note="Sense strand starting at position 2020 of SEQ ID NO: 2306"
ggcaguugccauuguccau

SEQ ID NO: 2092 - RNA, 19 nt, Artificial Sequence
  source: /note="Description of Artificial Sequence: Synthetic oligonucleotide"
  source: /note="Antisense strand to SEQ ID NO: 2091"
auggacaauggcaacugcc

SEQ ID NO: 2093 - RNA, 19 nt, Artificial Sequence
  source: /note="Description of Artificial Sequence: Synthetic oligonucleotide"
  source: /note="Sense strand starting at position 2020 of SEQ ID NO: 2318"
uguccauuguguuggcaga

SEQ ID NO: 2094 - RNA, 19 nt, Artificial Sequence
  source: /note="Description of Artificial Sequence: Synthetic oligonucleotide"
  source: /note="Antisense strand to SEQ ID NO: 2093"
ucugccaacacaauggaca

SEQ ID NO: 2095 - RNA, 19 nt, Artificial Sequence
  source: /note="Description of Artificial Sequence: Synthetic oligonucleotide"
  source: /note="Sense strand starting at position 2020 of SEQ ID NO: 2634"
aagauauuguccgccucca

SEQ ID NO: 2096 - RNA, 19 nt, Artificial Sequence
  source: /note="Description of Artificial Sequence: Synthetic oligonucleotide"
  source: /note="Antisense strand to SEQ ID NO: 2095"
uggaggcggacaauaucuu

SEQ ID NO: 2097 - RNA, 19 nt, Artificial Sequence
  source: /note="Description of Artificial Sequence: Synthetic oligonucleotide"
  source: /note="Sense strand starting at position 2020 of SEQ ID NO: 2711"
agggcauaaucucagaauu

SEQ ID NO: 2098 - RNA, 19 nt, Artificial Sequence
  source: /note="Description of Artificial Sequence: Synthetic oligonucleotide"
  source: /note="Antisense strand to SEQ ID NO: 2097"
aauucugagauuaugcccu

SEQ ID NO: 2099 - RNA, 19 nt, Artificial Sequence
  source: /note="Description of Artificial Sequence: Synthetic oligonucleotide"
  source: /note="Sense strand starting at position 2020 of SEQ ID NO: 2713"
ggcauaaucucagaauuac

SEQ ID NO: 2100 - RNA, 19 nt, Artificial Sequence
  source: /note="Description of Artificial Sequence: Synthetic oligonucleotide"
  source: /note="Antisense strand to SEQ ID NO: 2099"
guaauucugagauuaugcc

SEQ ID NO: 2101 - RNA, 19 nt, Artificial Sequence
  source: /note="Description of Artificial Sequence: Synthetic oligonucleotide"
  source: /note="Sense strand starting at position 2020 of SEQ ID NO: 2904"
cuccaucuugcuggaggaa

SEQ ID NO: 2102 - RNA, 19 nt, Artificial Sequence
  source: /note="Description of Artificial Sequence: Synthetic oligonucleotide"
  source: /note="Antisense strand to SEQ ID NO: 2101"
uuccuccagcaagauggag

SEQ ID NO: 2103 - RNA, 19 nt, Artificial Sequence
  source: /note="Description of Artificial Sequence: Synthetic oligonucleotide"
  source: /note="Sense strand starting at position 2020 of SEQ ID NO: 2916"
ggaggaagaucgugggcaa

SEQ ID NO: 2104 - RNA, 19 nt, Artificial Sequence
  source: /note="Description of Artificial Sequence: Synthetic oligonucleotide"
  source: /note="Antisense strand to SEQ ID NO: 2103"
uugcccacgaucuuccucc

SEQ ID NO: 2105 - RNA, 19 nt, Artificial Sequence
  source: /note="Description of Artificial Sequence: Synthetic oligonucleotide"
  source: /note="Sense strand starting at position 2020 of SEQ ID NO: 2919"
ggaagaucgugggcaaguu

SEQ ID NO: 2106 - RNA, 19 nt, Artificial Sequence
  source: /note="Description of Artificial Sequence: Synthetic oligonucleotide"
  source: /note="Antisense strand to SEQ ID NO: 2105"
aacuugcccacgaucuucc

SEQ ID NO: 2107 - RNA, 19 nt, Artificial Sequence
  source: /note="Description of Artificial Sequence: Synthetic oligonucleotide"
  source: /note="Sense strand starting at position 2020 of SEQ ID NO: 2920"
gaagaucgugggcaaguua

SEQ ID NO: 2108 - RNA, 19 nt, Artificial Sequence
  source: /note="Description of Artificial Sequence: Synthetic oligonucleotide"
  source: /note="Antisense strand to SEQ ID NO: 2107"
uaacuugcccacgaucuuc

SEQ ID NO: 2109 - RNA, 19 nt, Artificial Sequence
  source: /note="Description of Artificial Sequence: Synthetic oligonucleotide"
  source: /note="Sense strand starting at position 2020 of SEQ ID NO: 2927"
gugggcaaguuauauaauc

SEQ ID NO: 2110 - RNA, 19 nt, Artificial Sequence
  source: /note="Description of Artificial Sequence: Synthetic oligonucleotide"
  source: /note="Antisense strand to SEQ ID NO: 2109"
gauuauauaacuugcccac

SEQ ID NO: 2111 - RNA, 19 nt, Artificial Sequence
  source: /note="Description of Artificial Sequence: Synthetic oligonucleotide"
  source: /note="Sense strand starting at position 2020 of SEQ ID NO: 2981"
caagaauggucaggguugu

SEQ ID NO: 2112 - RNA, 19 nt, Artificial Sequence
  source: /note="Description of Artificial Sequence: Synthetic oligonucleotide"
  source: /note="Antisense strand to SEQ ID NO: 2111"
acaacccugaccauucuug

SEQ ID NO: 2113 - RNA, 19 nt, Artificial Sequence
  source: /note="Description of Artificial Sequence: Synthetic oligonucleotide"
  source: /note="Sense strand starting at position 2020 of SEQ ID NO: 2982"
aagaauggucaggguuguu

SEQ ID NO: 2114 - RNA, 19 nt, Artificial Sequence
  source: /note="Description of Artificial Sequence: Synthetic oligonucleotide"
  source: /note="Antisense strand to SEQ ID NO: 2113"
aacaacccugaccauucuu

SEQ ID NO: 2115 - RNA, 19 nt, Artificial Sequence
  source: /note="Description of Artificial Sequence: Synthetic oligonucleotide"
  source: /note="Sense strand starting at position 2020 of SEQ ID NO: 3010"
ugagacagccugugaaugu

SEQ ID NO: 2116 - RNA, 19 nt, Artificial Sequence
  source: /note="Description of Artificial Sequence: Synthetic oligonucleotide"
  source: /note="Antisense strand to SEQ ID NO: 2115"
acauucacaggcugucuca

SEQ ID NO: 2117 - RNA, 19 nt, Artificial Sequence
  source: /note="Description of Artificial Sequence: Synthetic oligonucleotide"
  source: /note="Sense strand starting at position 2020 of SEQ ID NO: 3024"
aauguaaagugcugugugu

SEQ ID NO: 2118 - RNA, 19 nt, Artificial Sequence
  source: /note="Description of Artificial Sequence: Synthetic oligonucleotide"
  source: /note="Antisense strand to SEQ ID NO: 2117"
acacacagcacuuuacauu

SEQ ID NO: 2119 - RNA, 19 nt, Artificial Sequence
  source: /note="Description of Artificial Sequence: Synthetic oligonucleotide"
  source: /note="Sense strand starting at position 2020 of SEQ ID NO: 3035"
cuguguguccguugguguu

SEQ ID NO: 2120 - RNA, 19 nt, Artificial Sequence
  source: /note="Description of Artificial Sequence: Synthetic oligonucleotide"
  source: /note="Antisense strand to SEQ ID NO: 2119"
aacaccaacggacacacag

SEQ ID NO: 2121 - RNA, 19 nt, Artificial Sequence
  source: /note="Description of Artificial Sequence: Synthetic oligonucleotide"
  source: /note="Sense strand starting at position 2020 of SEQ ID NO: 3058"
gcaccaucuugucagguuu

SEQ ID NO: 2122 - RNA, 19 nt, Artificial Sequence
  source: /note="Description of Artificial Sequence: Synthetic oligonucleotide"
  source: /note="Antisense strand to SEQ ID NO: 2121"
aaaccugacaagauggugc

SEQ ID NO: 2123 - RNA, 19 nt, Artificial Sequence
  source: /note="Description of Artificial Sequence: Synthetic oligonucleotide"
  source: /note="Sense strand starting at position 2020 of SEQ ID NO: 3069"
ucagguuucuccuggaagg

SEQ ID NO: 2124 - RNA, 19 nt, Artificial Sequence
  source: /note="Description of Artificial Sequence: Synthetic oligonucleotide"
  source: /note="Antisense strand to SEQ ID NO: 2123"
ccuuccaggagaaaccuga

SEQ ID NO: 2125 - RNA, 19 nt, Artificial Sequence
  source: /note="Description of Artificial Sequence: Synthetic oligonucleotide"
  source: /note="Sense strand starting at position 2020 of SEQ ID NO: 3151"
gaggaacugugacaucacu

SEQ ID NO: 2126 - RNA, 19 nt, Artificial Sequence
  source: /note="Description of Artificial Sequence: Synthetic oligonucleotide"
  source: /note="Antisense strand to SEQ ID NO: 2125"
agugaugucacaguuccuc

SEQ ID NO: 2127 - RNA, 19 nt, Artificial Sequence
  source: /note="Description of Artificial Sequence: Synthetic oligonucleotide"
  source: /note="Sense strand starting at position 2020 of SEQ ID NO: 3185"
gccaccaucucacagauga

SEQ ID NO: 2128 - RNA, 19 nt, Artificial Sequence
  source: /note="Description of Artificial Sequence: Synthetic oligonucleotide"
  source: /note="Antisense strand to SEQ ID NO: 2127"
ucaucugugagaugguggc

SEQ ID NO: 2129 - RNA, 19 nt, Artificial Sequence
  source: /note="Description of Artificial Sequence: Synthetic oligonucleotide"
  source: /note="Sense strand starting at position 2020 of SEQ ID NO: 3241"
ugucaucucucagggaguu

SEQ ID NO: 2130 - RNA, 19 nt, Artificial Sequence
  source: /note="Description of Artificial Sequence: Synthetic oligonucleotide"
  source: /note="Antisense strand to SEQ ID NO: 2129"
aacucccugagagaugaca

SEQ ID NO: 2131 - RNA, 19 nt, Artificial Sequence
  source: /note="Description of Artificial Sequence: Synthetic oligonucleotide"
  source: /note="Sense strand starting at position 2020 of SEQ ID NO: 3242"
gucaucucucagggaguua

SEQ ID NO: 2132 - RNA, 19 nt, Artificial Sequence
  source: /note="Description of Artificial Sequence: Synthetic oligonucleotide"
  source: /note="Antisense strand to SEQ ID NO: 2131"
uaacucccugagagaugac

SEQ ID NO: 2133 - RNA, 19 nt, Artificial Sequence
  source: /note="Description of Artificial Sequence: Synthetic oligonucleotide"
  source: /note="Sense strand starting at position 2020 of SEQ ID NO: 3362"
ggcugacaucucuguuuac

SEQ ID NO: 2134 - RNA, 19 nt, Artificial Sequence
  source: /note="Description of Artificial Sequence: Synthetic oligonucleotide"
  source: /note="Antisense strand to SEQ ID NO: 2133"
guaaacagagaugucagcc

SEQ ID NO: 2135 - RNA, 19 nt, Artificial Sequence
  source: /note="Description of Artificial Sequence: Synthetic oligonucleotide"
  source: /note="Sense strand starting at position 2020 of SEQ ID NO: 3369"
aucucuguuuaccagauca

SEQ ID NO: 2136 - RNA, 19 nt, Artificial Sequence
  source: /note="Description of Artificial Sequence: Synthetic oligonucleotide"
  source: /note="Antisense strand to SEQ ID NO: 2135"
ugaucugguaaacagagau

SEQ ID NO: 2137 - RNA, 19 nt, Artificial Sequence
  source: /note="Description of Artificial Sequence: Synthetic oligonucleotide"
  source: /note="Sense strand starting at position 2020 of SEQ ID NO: 3418"
agagaagauucuggagcca

SEQ ID NO: 2138 - RNA, 19 nt, Artificial Sequence
  source: /note="Description of Artificial Sequence: Synthetic oligonucleotide"
  source: /note="Antisense strand to SEQ ID NO: 2137"
uggcuccagaaucuucucu

SEQ ID NO: 2139 - RNA, 19 nt, Artificial Sequence
  source: /note="Description of Artificial Sequence: Synthetic oligonucleotide"
  source: /note="Sense strand starting at position 2020 of SEQ ID NO: 3487"
cuggaugaguuaugauaca

SEQ ID NO: 2140 - RNA, 19 nt, Artificial Sequence
  source: /note="Description of Artificial Sequence: Synthetic oligonucleotide"
  source: /note="Antisense strand to SEQ ID NO: 2139"
uguaucauaacucauccag

SEQ ID NO: 2141 - RNA, 19 nt, Artificial Sequence
  source: /note="Description of Artificial Sequence: Synthetic oligonucleotide"
  source: /note="Sense strand starting at position 2020 of SEQ ID NO: 3518"
acaucaguuucugauugaa

SEQ ID NO: 2142 - RNA, 19 nt, Artificial Sequence
  source: /note="Description of Artificial Sequence: Synthetic oligonucleotide"
  source: /note="Antisense strand to SEQ ID NO: 2141"
uucaaucagaaacugaugu

SEQ ID NO: 2143 - RNA, 19 nt, Artificial Sequence
  source: /note="Description of Artificial Sequence: Synthetic oligonucleotide"
  source: /note="Sense strand starting at position 2020 of SEQ ID NO: 3530"
gauugaagauaaugauaga

SEQ ID NO: 2144 - RNA, 19 nt, Artificial Sequence
  source: /note="Description of Artificial Sequence: Synthetic oligonucleotide"
  source: /note="Antisense strand to SEQ ID NO: 2143"
ucuaucauuaucuucaauc

SEQ ID NO: 2145 - RNA, 19 nt, Artificial Sequence
  source: /note="Description of Artificial Sequence: Synthetic oligonucleotide"
  source: /note="Sense strand starting at position 2020 of SEQ ID NO: 3551"
augccaucgcccugaguua

SEQ ID NO: 2146 - RNA, 19 nt, Artificial Sequence
  source: /note="Description of Artificial Sequence: Synthetic oligonucleotide"
  source: /note="Antisense strand to SEQ ID NO: 2145"
uaacucagggcgauggcau

SEQ ID NO: 2147 - RNA, 19 nt, Artificial Sequence
  source: /note="Description of Artificial Sequence: Synthetic oligonucleotide"
  source: /note="Sense strand starting at position 2020 of SEQ ID NO: 3552"
ugccaucgcccugaguuau

SEQ ID NO: 2148 - RNA, 19 nt, Artificial Sequence
  source: /note="Description of Artificial Sequence: Synthetic oligonucleotide"
  source: /note="Antisense strand to SEQ ID NO: 2147"
auaacucagggcgauggca

SEQ ID NO: 2149 - RNA, 19 nt, Artificial Sequence
  source: /note="Description of Artificial Sequence: Synthetic oligonucleotide"
  source: /note="Sense strand starting at position 2020 of SEQ ID NO: 3582"
cuguguggcaagcagaaua

SEQ ID NO: 2150 - RNA, 19 nt, Artificial Sequence
  source: /note="Description of Artificial Sequence: Synthetic oligonucleotide"
  source: /note="Antisense strand to SEQ ID NO: 2149"
uauucugcuugccacacag

SEQ ID NO: 2151 - RNA, 19 nt, Artificial Sequence
  source: /note="Description of Artificial Sequence: Synthetic oligonucleotide"
  source: /note="Sense strand starting at position 2020 of SEQ ID NO: 3648"
ugcuaccuuccauggcaaa

SEQ ID NO: 2152 - RNA, 19 nt, Artificial Sequence
  source: /note="Description of Artificial Sequence: Synthetic oligonucleotide"
  source: /note="Antisense strand to SEQ ID NO: 2151"
uuugccauggaagguagca

SEQ ID NO: 2153 - RNA, 19 nt, Artificial Sequence
  source: /note="Description of Artificial Sequence: Synthetic oligonucleotide"
  source: /note="Sense strand starting at position 2020 of SEQ ID NO: 3675"
uugcuagugugauuaagga

SEQ ID NO: 2154 - RNA, 19 nt, Artificial Sequence
  source: /note="Description of Artificial Sequence: Synthetic oligonucleotide"
  source: /note="Antisense strand to SEQ ID NO: 2153"
uccuuaaucacacuagcaa

SEQ ID NO: 2155 - RNA, 19 nt, Artificial Sequence
  source: /note="Description of Artificial Sequence: Synthetic oligonucleotide"
  source: /note="Sense strand starting at position 2020 of SEQ ID NO: 3750"
gguccuuaauuauacaaga

SEQ ID NO: 2156 - RNA, 19 nt, Artificial Sequence
  source: /note="Description of Artificial Sequence: Synthetic oligonucleotide"
  source: /note="Antisense strand to SEQ ID NO: 2155"
ucuuguauaauuaaggacc

SEQ ID NO: 2157 - RNA, 19 nt, Artificial Sequence
  source: /note="Description of Artificial Sequence: Synthetic oligonucleotide"
  source: /note="Sense strand starting at position 2020 of SEQ ID NO: 3972"
ggacuucuguccuccauaa

SEQ ID NO: 2158 - RNA, 19 nt, Artificial Sequence
  source: /note="Description of Artificial Sequence: Synthetic oligonucleotide"
  source: /note="Antisense strand to SEQ ID NO: 2157"
uuauggaggacagaagucc

SEQ ID NO: 2159 - RNA, 19 nt, Artificial Sequence
  source: /note="Description of Artificial Sequence: Synthetic oligonucleotide"
  source: /note="Sense strand starting at position 2020 of SEQ ID NO: 3976"
uucuguccuccauaacugu

SEQ ID NO: 2160 - RNA, 19 nt, Artificial Sequence
  source: /note="Description of Artificial Sequence: Synthetic oligonucleotide"
  source: /note="Antisense strand to SEQ ID NO: 2159"
acaguuauggaggacagaa

SEQ ID NO: 2161 - RNA, 19 nt, Artificial Sequence
  source: /note="Description of Artificial Sequence: Synthetic oligonucleotide"
  source: /note="Sense strand starting at position 2021 of SEQ ID NO: 248"
ccucauuguaucuguguga

SEQ ID NO: 2162 - RNA, 19 nt, Artificial Sequence
  source: /note="Description of Artificial Sequence: Synthetic oligonucleotide"
  source: /note="Antisense strand to SEQ ID NO: 2161"
ucacacagauacaaugagg

SEQ ID NO: 2163 - RNA, 19 nt, Artificial Sequence
  source: /note="Description of Artificial Sequence: Synthetic oligonucleotide"
  source: /note="Sense strand starting at position 2021 of SEQ ID NO: 252"
auuguaucugugugaccca

SEQ ID NO: 2164 - RNA, 19 nt, Artificial Sequence
  source: /note="Description of Artificial Sequence: Synthetic oligonucleotide"
  source: /note="Antisense strand to SEQ ID NO: 2163"
ugggucacacagauacaau

SEQ ID NO: 2165 - RNA, 19 nt, Artificial Sequence
  source: /note="Description of Artificial Sequence: Synthetic oligonucleotide"
  source: /note="Sense strand starting at position 2021 of SEQ ID NO: 349"
ugaugaacauccuauggau

SEQ ID NO: 2166 - RNA, 19 nt, Artificial Sequence
  source: /note="Description of Artificial Sequence: Synthetic oligonucleotide"
  source: /note="Antisense strand to SEQ ID NO: 2165"
auccauaggauguucauca

SEQ ID NO: 2167 - RNA, 19 nt, Artificial Sequence
  source: /note="Description of Artificial Sequence: Synthetic oligonucleotide"
  source: /note="Sense strand starting at position 2021 of SEQ ID NO: 653"
cggccaucauauggauuau

SEQ ID NO: 2168 - RNA, 19 nt, Artificial Sequence
  source: /note="Description of Artificial Sequence: Synthetic oligonucleotide"
  source: /note="Antisense strand to SEQ ID NO: 2167"
auaauccauaugauggccg

SEQ ID NO: 2169 - RNA, 19 nt, Artificial Sequence
  source: /note="Description of Artificial Sequence: Synthetic oligonucleotide"
  source: /note="Sense strand starting at position 2021 of SEQ ID NO: 719"
guuaccaguuucucuagua

SEQ ID NO: 2170 - RNA, 19 nt, Artificial Sequence
  source: /note="Description of Artificial Sequence: Synthetic oligonucleotide"
  source: /note="Antisense strand to SEQ ID NO: 2169"
uacuagagaaacugguaac

SEQ ID NO: 2171 - RNA, 19 nt, Artificial Sequence
  source: /note="Description of Artificial Sequence: Synthetic oligonucleotide"
  source: /note="Sense strand starting at position 2021 of SEQ ID NO: 724"
caguuucucuaguaguaag

SEQ ID NO: 2172 - RNA, 19 nt, Artificial Sequence
  source: /note="Description of Artificial Sequence: Synthetic oligonucleotide"
  source: /note="Antisense strand to SEQ ID NO: 2171"
cuuacuacuagagaaacug

SEQ ID NO: 2173 - RNA, 19 nt, Artificial Sequence
  source: /note="Description of Artificial Sequence: Synthetic oligonucleotide"
  source: /note="Sense strand starting at position 2021 of SEQ ID NO: 727"
uuucucuaguaguaagaau

SEQ ID NO: 2174 - RNA, 19 nt, Artificial Sequence
  source: /note="Description of Artificial Sequence: Synthetic oligonucleotide"
  source: /note="Antisense strand to SEQ ID NO: 2173"
auucuuacuacuagagaaa

SEQ ID NO: 2175 - RNA, 19 nt, Artificial Sequence
  source: /note="Description of Artificial Sequence: Synthetic oligonucleotide"
  source: /note="Sense strand starting at position 2021 of SEQ ID NO: 1100"
cuggcccuacugugagaua

SEQ ID NO: 2176 - RNA, 19 nt, Artificial Sequence
  source: /note="Description of Artificial Sequence: Synthetic oligonucleotide"
  source: /note="Antisense strand to SEQ ID NO: 2175"
uaucucacaguagggccag

SEQ ID NO: 2177 - RNA, 19 nt, Artificial Sequence
  source: /note="Description of Artificial Sequence: Synthetic oligonucleotide"
  source: /note="Sense strand starting at position 2021 of SEQ ID NO: 1101"
uggcccuacugugagauau

SEQ ID NO: 2178 - RNA, 19 nt, Artificial Sequence
  source: /note="Description of Artificial Sequence: Synthetic oligonucleotide"
  source: /note="Antisense strand to SEQ ID NO: 2177"
auaucucacaguagggcca

SEQ ID NO: 2179 - RNA, 19 nt, Artificial Sequence
  source: /note="Description of Artificial Sequence: Synthetic oligonucleotide"
  source: /note="Sense strand starting at position 2021 of SEQ ID NO: 1103"
gcccuacugugagauauca

SEQ ID NO: 2180 - RNA, 19 nt, Artificial Sequence
  source: /note="Description of Artificial Sequence: Synthetic oligonucleotide"
  source: /note="Antisense strand to SEQ ID NO: 2179"
ugauaucucacaguagggc

SEQ ID NO: 2181 - RNA, 19 nt, Artificial Sequence
  source: /note="Description of Artificial Sequence: Synthetic oligonucleotide"
  source: /note="Sense strand starting at position 2021 of SEQ ID NO: 1239"
ggaggucuuugggacucaa

SEQ ID NO: 2182 - RNA, 19 nt, Artificial Sequence
  source: /note="Description of Artificial Sequence: Synthetic oligonucleotide"
  source: /note="Antisense strand to SEQ ID NO: 2181"
uugagucccaaagaccucc

SEQ ID NO: 2183 - RNA, 19 nt, Artificial Sequence
  source: /note="Description of Artificial Sequence: Synthetic oligonucleotide"
  source: /note="Sense strand starting at position 2021 of SEQ ID NO: 1267"
gcgaguucuggccggaaau

SEQ ID NO: 2184 - RNA, 19 nt, Artificial Sequence
  source: /note="Description of Artificial Sequence: Synthetic oligonucleotide"
  source: /note="Antisense strand to SEQ ID NO: 2183"
auuuccggccagaacucgc

SEQ ID NO: 2185 - RNA, 19 nt, Artificial Sequence
  source: /note="Description of Artificial Sequence: Synthetic oligonucleotide"
  source: /note="Sense strand starting at position 2021 of SEQ ID NO: 1268"
cgaguucuggccggaaauc

SEQ ID NO: 2186 - RNA, 19 nt, Artificial Sequence
  source: /note="Description of Artificial Sequence: Synthetic oligonucleotide"
  source: /note="Antisense strand to SEQ ID NO: 2185"
gauuuccggccagaacucg

SEQ ID NO: 2187 - RNA, 19 nt, Artificial Sequence
  source: /note="Description of Artificial Sequence: Synthetic oligonucleotide"
  source: /note="Sense strand starting at position 2021 of SEQ ID NO: 1277"
gccggaaaucagggucuca

SEQ ID NO: 2188 - RNA, 19 nt, Artificial Sequence
  source: /note="Description of Artificial Sequence: Synthetic oligonucleotide"
  source: /note="Antisense strand to SEQ ID NO: 2187"
ugagacccugauuuccggc

SEQ ID NO: 2189 - RNA, 19 nt, Artificial Sequence
  source: /note="Description of Artificial Sequence: Synthetic oligonucleotide"
  source: /note="Sense strand starting at position 2021 of SEQ ID NO: 1519"
uccaacucaucuuugugua

SEQ ID NO: 2190 - RNA, 19 nt, Artificial Sequence
  source: /note="Description of Artificial Sequence: Synthetic oligonucleotide"
  source: /note="Antisense strand to SEQ ID NO: 2189"
uacacaaagaugaguugga

SEQ ID NO: 2191 - RNA, 19 nt, Artificial Sequence
  source: /note="Description of Artificial Sequence: Synthetic oligonucleotide"
  source: /note="Sense strand starting at position 2021 of SEQ ID NO: 1523"
acucaucuuuguguaccua

SEQ ID NO: 2192 - RNA, 19 nt, Artificial Sequence
  source: /note="Description of Artificial Sequence: Synthetic oligonucleotide"
  source: /note="Antisense strand to SEQ ID NO: 2191"
uagguacacaaagaugagu

SEQ ID NO: 2193 - RNA, 19 nt, Artificial Sequence
  source: /note="Description of Artificial Sequence: Synthetic oligonucleotide"
  source: /note="Sense strand starting at position 2021 of SEQ ID NO: 1540"
uaaggacuugccugaguuu

SEQ ID NO: 2194 - RNA, 19 nt, Artificial Sequence
  source: /note="Description of Artificial Sequence: Synthetic oligonucleotide"
  source: /note="Antisense strand to SEQ ID NO: 2193"
aaacucaggcaaguccuua

SEQ ID NO: 2195 - RNA, 19 nt, Artificial Sequence
  source: /note="Description of Artificial Sequence: Synthetic oligonucleotide"
  source: /note="Sense strand starting at position 2021 of SEQ ID NO: 1543"
ggacuugccugaguuuauc

SEQ ID NO: 2196 - RNA, 19 nt, Artificial Sequence
  source: /note="Description of Artificial Sequence: Synthetic oligonucleotide"
  source: /note="Antisense strand to SEQ ID NO: 2195"
gauaaacucaggcaagucc

SEQ ID NO: 2197 - RNA, 19 nt, Artificial Sequence
  source: /note="Description of Artificial Sequence: Synthetic oligonucleotide"
  source: /note="Sense strand starting at position 2021 of SEQ ID NO: 1549"
gccugaguuuaucgcugaa

SEQ ID NO: 2198 - RNA, 19 nt, Artificial Sequence
  source: /note="Description of Artificial Sequence: Synthetic oligonucleotide"
  source: /note="Antisense strand to SEQ ID NO: 2197"
uucagcgauaaacucaggc

SEQ ID NO: 2199 - RNA, 19 nt, Artificial Sequence
  source: /note="Description of Artificial Sequence: Synthetic oligonucleotide"
  source: /note="Sense strand starting at position 2021 of SEQ ID NO: 2116"
auaguugcaucaggcgaau

SEQ ID NO: 2200 - RNA, 19 nt, Artificial Sequence
  source: /note="Description of Artificial Sequence: Synthetic oligonucleotide"
  source: /note="Antisense strand to SEQ ID NO: 2199"
auucgccugaugcaacuau

SEQ ID NO: 2201 - RNA, 19 nt, Artificial Sequence
  source: /note="Description of Artificial Sequence: Synthetic oligonucleotide"
  source: /note="Sense strand starting at position 2021 of SEQ ID NO: 2228"
gggaguuccugagacucac

SEQ ID NO: 2202 - RNA, 19 nt, Artificial Sequence
  source: /note="Description of Artificial Sequence: Synthetic oligonucleotide"
  source: /note="Antisense strand to SEQ ID NO: 2201"
gugagucucaggaacuccc

SEQ ID NO: 2203 - RNA, 19 nt, Artificial Sequence
  source: /note="Description of Artificial Sequence: Synthetic oligonucleotide"
  source: /note="Sense strand starting at position 2021 of SEQ ID NO: 2276"
uaggcaucgcaaugaugau

SEQ ID NO: 2204 - RNA, 19 nt, Artificial Sequence
  source: /note="Description of Artificial Sequence: Synthetic oligonucleotide"
  source: /note="Antisense strand to SEQ ID NO: 2203"
aucaucauugcgaugccua

SEQ ID NO: 2205 - RNA, 19 nt, Artificial Sequence
  source: /note="Description of Artificial Sequence: Synthetic oligonucleotide"
  source: /note="Sense strand starting at position 2021 of SEQ ID NO: 2282"
ucgcaaugaugaugguaau

SEQ ID NO: 2206 - RNA, 19 nt, Artificial Sequence
  source: /note="Description of Artificial Sequence: Synthetic oligonucleotide"
  source: /note="Antisense strand to SEQ ID NO: 2205"
auuaccaucaucauugcga

SEQ ID NO: 2207 - RNA, 19 nt, Artificial Sequence
  source: /note="Description of Artificial Sequence: Synthetic oligonucleotide"
  source: /note="Sense strand starting at position 2021 of SEQ ID NO: 2288"
ugaugaugguaauaacagu

SEQ ID NO: 2208 - RNA, 19 nt, Artificial Sequence
  source: /note="Description of Artificial Sequence: Synthetic oligonucleotide"
  source: /note="Antisense strand to SEQ ID NO: 2207"
acuguuauuaccaucauca

SEQ ID NO: 2209 - RNA, 19 nt, Artificial Sequence
  source: /note="Description of Artificial Sequence: Synthetic oligonucleotide"
  source: /note="Sense strand starting at position 2021 of SEQ ID NO: 2325"
gaugguuugcccugagcug

SEQ ID NO: 2210 - RNA, 19 nt, Artificial Sequence
  source: /note="Description of Artificial Sequence: Synthetic oligonucleotide"
  source: /note="Antisense strand to SEQ ID NO: 2209"
cagcucagggcaaaccauc

SEQ ID NO: 2211 - RNA, 19 nt, Artificial Sequence
  source: /note="Description of Artificial Sequence: Synthetic oligonucleotide"
  source: /note="Sense strand starting at position 2021 of SEQ ID NO: 2411"
uggccugguuaguauccaa

SEQ ID NO: 2212 - RNA, 19 nt, Artificial Sequence
  source: /note="Description of Artificial Sequence: Synthetic oligonucleotide"
  source: /note="Antisense strand to SEQ ID NO: 2211"
uuggauacuaaccaggcca

SEQ ID NO: 2213 - RNA, 19 nt, Artificial Sequence
  source: /note="Description of Artificial Sequence: Synthetic oligonucleotide"
  source: /note="Sense strand starting at position 2021 of SEQ ID NO: 2528"
gugggugauugugcaagua

SEQ ID NO: 2214 - RNA, 19 nt, Artificial Sequence
  source: /note="Description of Artificial Sequence: Synthetic oligonucleotide"
  source: /note="Antisense strand to SEQ ID NO: 2213"
uacuugcacaaucacccac

SEQ ID NO: 2215 - RNA, 19 nt, Artificial Sequence
  source: /note="Description of Artificial Sequence: Synthetic oligonucleotide"
  source: /note="Sense strand starting at position 2021 of SEQ ID NO: 2576"
ugauguuaguccugccuca

SEQ ID NO: 2216 - RNA, 19 nt, Artificial Sequence
  source: /note="Description of Artificial Sequence: Synthetic oligonucleotide"
  source: /note="Antisense strand to SEQ ID NO: 2215"
ugaggcaggacuaacauca

SEQ ID NO: 2217 - RNA, 19 nt, Artificial Sequence
  source: /note="Description of Artificial Sequence: Synthetic oligonucleotide"
  source: /note="Sense strand starting at position 2021 of SEQ ID NO: 2583"
aguccugccucaugagcua

SEQ ID NO: 2218 - RNA, 19 nt, Artificial Sequence
  source: /note="Description of Artificial Sequence: Synthetic oligonucleotide"
  source: /note="Antisense strand to SEQ ID NO: 2217"
uagcucaugaggcaggacu

SEQ ID NO: 2219 - RNA, 19 nt, Artificial Sequence
  source: /note="Description of Artificial Sequence: Synthetic oligonucleotide"
  source: /note="Sense strand starting at position 2021 of SEQ ID NO: 2594"
augagcuacuugugagaag

SEQ ID NO: 2220 - RNA, 19 nt, Artificial Sequence
  source: /note="Description of Artificial Sequence: Synthetic oligonucleotide"
  source: /note="Antisense strand to SEQ ID NO: 2219"
cuucucacaaguagcucau

SEQ ID NO: 2221 - RNA, 19 nt, Artificial Sequence
  source: /note="Description of Artificial Sequence: Synthetic oligonucleotide"
  source: /note="Sense strand starting at position 2021 of SEQ ID NO: 2595"
ugagcuacuugugagaagu

SEQ ID NO: 2222 - RNA, 19 nt, Artificial Sequence
  source: /note="Description of Artificial Sequence: Synthetic oligonucleotide"
  source: /note="Antisense strand to SEQ ID NO: 2221"
acuucucacaaguagcuca

SEQ ID NO: 2223 - RNA, 19 nt, Artificial Sequence
  source: /note="Description of Artificial Sequence: Synthetic oligonucleotide"
  source: /note="Sense strand starting at position 2021 of SEQ ID NO: 2597"
agcuacuugugagaaguaa

SEQ ID NO: 2224 - RNA, 19 nt, Artificial Sequence
  source: /note="Description of Artificial Sequence: Synthetic oligonucleotide"
  source: /note="Antisense strand to SEQ ID NO: 2223"
uuacuucucacaaguagcu

SEQ ID NO: 2225 - RNA, 19 nt, Artificial Sequence
  source: /note="Description of Artificial Sequence: Synthetic oligonucleotide"
  source: /note="Sense strand starting at position 2021 of SEQ ID NO: 2627"
cauguugagugcuuagaac

SEQ ID NO: 2226 - RNA, 19 nt, Artificial Sequence
  source: /note="Description of Artificial Sequence: Synthetic oligonucleotide"
  source: /note="Antisense strand to SEQ ID NO: 2225"
guucuaagcacucaacaug

SEQ ID NO: 2227 - RNA, 19 nt, Artificial Sequence
  source: /note="Description of Artificial Sequence: Synthetic oligonucleotide"
  source: /note="Sense strand starting at position 2021 of SEQ ID NO: 2657"
cacaguaggcgcgauuauu

SEQ ID NO: 2228 - RNA, 19 nt, Artificial Sequence
  source: /note="Description of Artificial Sequence: Synthetic oligonucleotide"
  source: /note="Antisense strand to SEQ ID NO: 2227"
aauaaucgcgccuacugug

SEQ ID NO: 2229 - RNA, 19 nt, Artificial Sequence
  source: /note="Description of Artificial Sequence: Synthetic oligonucleotide"
  source: /note="Sense strand starting at position 2021 of SEQ ID NO: 2665"
gcgcgauuauuucauuguu

SEQ ID NO: 2230 - RNA, 19 nt, Artificial Sequence
  source: /note="Description of Artificial Sequence: Synthetic oligonucleotide"
  source: /note="Antisense strand to SEQ ID NO: 2229"
aacaaugaaauaaucgcgc

SEQ ID NO: 2231 - RNA, 19 nt, Artificial Sequence
  source: /note="Description of Artificial Sequence: Synthetic oligonucleotide"
  source: /note="Sense strand starting at position 2021 of SEQ ID NO: 2686"
aguaauaguguuuggugca

SEQ ID NO: 2232 - RNA, 19 nt, Artificial Sequence
  source: /note="Description of Artificial Sequence: Synthetic oligonucleotide"
  source: /note="Antisense strand to SEQ ID NO: 2231"
ugcaccaaacacuauuacu

SEQ ID NO: 2233 - RNA, 19 nt, Artificial Sequence
  source: /note="Description of Artificial Sequence: Synthetic oligonucleotide"
  source: /note="Sense strand starting at position 2021 of SEQ ID NO: 2687"
guaauaguguuuggugcaa

SEQ ID NO: 2234 - RNA, 19 nt, Artificial Sequence
  source: /note="Description of Artificial Sequence: Synthetic oligonucleotide"
  source: /note="Antisense strand to SEQ ID NO: 2233"
uugcaccaaacacuauuac

SEQ ID NO: 2235 - RNA, 19 nt, Artificial Sequence
  source: /note="Description of Artificial Sequence: Synthetic oligonucleotide"
  source: /note="Sense strand starting at position 2021 of SEQ ID NO: 2689"
aauaguguuuggugcaauu

SEQ ID NO: 2236 - RNA, 19 nt, Artificial Sequence
  source: /note="Description of Artificial Sequence: Synthetic oligonucleotide"
  source: /note="Antisense strand to SEQ ID NO: 2235"
aauugcaccaaacacuauu

SEQ ID NO: 2237 - RNA, 19 nt, Artificial Sequence
  source: /note="Description of Artificial Sequence: Synthetic oligonucleotide"
  source: /note="Sense strand starting at position 2021 of SEQ ID NO: 2691"
uaguguuuggugcaauuau

SEQ ID NO: 2238 - RNA, 19 nt, Artificial Sequence
  source: /note="Description of Artificial Sequence: Synthetic oligonucleotide"
  source: /note="Antisense strand to SEQ ID NO: 2237"
auaauugcaccaaacacua

SEQ ID NO: 2239 - RNA, 19 nt, Artificial Sequence
  source: /note="Description of Artificial Sequence: Synthetic oligonucleotide"
  source: /note="Sense strand starting at position 2021 of SEQ ID NO: 2698"
uggugcaauuauugucauu

SEQ ID NO: 2240 - RNA, 19 nt, Artificial Sequence
  source: /note="Description of Artificial Sequence: Synthetic oligonucleotide"
  source: /note="Antisense strand to SEQ ID NO: 2239"
aaugacaauaauugcacca

SEQ ID NO: 2241 - RNA, 19 nt, Artificial Sequence
  source: /note="Description of Artificial Sequence: Synthetic oligonucleotide"
  source: /note="Sense strand starting at position 2021 of SEQ ID NO: 2700"
gugcaauuauugucauugu

SEQ ID NO: 2242 - RNA, 19 nt, Artificial Sequence
  source: /note="Description of Artificial Sequence: Synthetic oligonucleotide"
  source: /note="Antisense strand to SEQ ID NO: 2241"
acaaugacaauaauugcac

SEQ ID NO: 2243 - RNA, 19 nt, Artificial Sequence
  source: /note="Description of Artificial Sequence: Synthetic oligonucleotide"
  source: /note="Sense strand starting at position 2021 of SEQ ID NO: 2701"
ugcaauuauugucauuguu

SEQ ID NO: 2244 - RNA, 19 nt, Artificial Sequence
  source: /note="Description of Artificial Sequence: Synthetic oligonucleotide"
  source: /note="Antisense strand to SEQ ID NO: 2243"
aacaaugacaauaauugca

SEQ ID NO: 2245 - RNA, 19 nt, Artificial Sequence
  source: /note="Description of Artificial Sequence: Synthetic oligonucleotide"
  source: /note="Sense strand starting at position 2021 of SEQ ID NO: 2717"
guuguuauuuaucaucauc

SEQ ID NO: 2246 - RNA, 19 nt, Artificial Sequence
  source: /note="Description of Artificial Sequence: Synthetic oligonucleotide"
  source: /note="Antisense strand to SEQ ID NO: 2245"
gaugaugauaaauaacaac

SEQ ID NO: 2247 - RNA, 19 nt, Artificial Sequence
  source: /note="Description of Artificial Sequence: Synthetic oligonucleotide"
  source: /note="Sense strand starting at position 2021 of SEQ ID NO: 2764"
gccugaagugcccauuaua

SEQ ID NO: 2248 - RNA, 19 nt, Artificial Sequence
  source: /note="Description of Artificial Sequence: Synthetic oligonucleotide"
  source: /note="Antisense strand to SEQ ID NO: 2247"
uauaaugggcacuucaggc

SEQ ID NO: 2249 - RNA, 19 nt, Artificial Sequence
  source: /note="Description of Artificial Sequence: Synthetic oligonucleotide"
  source: /note="Sense strand starting at position 2021 of SEQ ID NO: 2992"
cccugagugccucgcuauu

SEQ ID NO: 2250 - RNA, 19 nt, Artificial Sequence
  source: /note="Description of Artificial Sequence: Synthetic oligonucleotide"
  source: /note="Antisense strand to SEQ ID NO: 2249"
aauagcgaggcacucaggg

SEQ ID NO: 2251 - RNA, 19 nt, Artificial Sequence
  source: /note="Description of Artificial Sequence: Synthetic oligonucleotide"
  source: /note="Sense strand starting at position 2021 of SEQ ID NO: 3046"
ccuccaauguccuucugua

SEQ ID NO: 2252 - RNA, 19 nt, Artificial Sequence
  source: /note="Description of Artificial Sequence: Synthetic oligonucleotide"
  source: /note="Antisense strand to SEQ ID NO: 2251"
uacagaaggacauuggagg

SEQ ID NO: 2253 - RNA, 19 nt, Artificial Sequence
  source: /note="Description of Artificial Sequence: Synthetic oligonucleotide"
  source: /note="Sense strand starting at position 2021 of SEQ ID NO: 3137"
uguccuaucuccugacuga

SEQ ID NO: 2254 - RNA, 19 nt, Artificial Sequence
  source: /note="Description of Artificial Sequence: Synthetic oligonucleotide"
  source: /note="Antisense strand to SEQ ID NO: 2253"
ucagucaggagauaggaca

SEQ ID NO: 2255 - RNA, 19 nt, Artificial Sequence
  source: /note="Description of Artificial Sequence: Synthetic oligonucleotide"
  source: /note="Sense strand starting at position 2021 of SEQ ID NO: 3502"
caggucaucuuuggcaagu

SEQ ID NO: 2256 - RNA, 19 nt, Artificial Sequence
  source: /note="Description of Artificial Sequence: Synthetic oligonucleotide"
  source: /note="Antisense strand to SEQ ID NO: 2255"
acuugccaaagaugaccug

SEQ ID NO: 2257 - RNA, 19 nt, Artificial Sequence
  source: /note="Description of Artificial Sequence: Synthetic oligonucleotide"
  source: /note="Sense strand starting at position 2021 of SEQ ID NO: 3561"
ggucuaccauaacaaguau

SEQ ID NO: 2258 - RNA, 19 nt, Artificial Sequence
  source: /note="Description of Artificial Sequence: Synthetic oligonucleotide"
  source: /note="Antisense strand to SEQ ID NO: 2257"
auacuuguuaugguagacc

SEQ ID NO: 2259 - RNA, 19 nt, Artificial Sequence
  source: /note="Description of Artificial Sequence: Synthetic oligonucleotide"
  source: /note="Sense strand starting at position 2021 of SEQ ID NO: 3847"
cgaguucuacgaggaguuc

SEQ ID NO: 2260 - RNA, 19 nt, Artificial Sequence
  source: /note="Description of Artificial Sequence: Synthetic oligonucleotide"
  source: /note="Antisense strand to SEQ ID NO: 2259"
gaacuccucguagaacucg

SEQ ID NO: 2261 - RNA, 19 nt, Artificial Sequence
  source: /note="Description of Artificial Sequence: Synthetic oligonucleotide"
  source: /note="Sense strand starting at position 2022 of SEQ ID NO: 103"
ggucaacaguuugaagaga

SEQ ID NO: 2262 - RNA, 19 nt, Artificial Sequence
  source: /note="Description of Artificial Sequence: Synthetic oligonucleotide"
  source: /note="Antisense strand to SEQ ID NO: 2261"
ucucuucaaacuguugacc

SEQ ID NO: 2263 - RNA, 19 nt, Artificial Sequence
  source: /note="Description of Artificial Sequence: Synthetic oligonucleotide"
  source: /note="Sense strand starting at position 2022 of SEQ ID NO: 120"
gaaaguaucucugggcaua

SEQ ID NO: 2264 - RNA, 19 nt, Artificial Sequence
  source: /note="Description of Artificial Sequence: Synthetic oligonucleotide"
  source: /note="Antisense strand to SEQ ID NO: 2263"
uaugcccagagauacuuuc

SEQ ID NO: 2265 - RNA, 19 nt, Artificial Sequence
  source: /note="Description of Artificial Sequence: Synthetic oligonucleotide"
  source: /note="Sense strand starting at position 2022 of SEQ ID NO: 255"
cagguaucgugaggucuga

SEQ ID NO: 2266 - RNA, 19 nt, Artificial Sequence
  source: /note="Description of Artificial Sequence: Synthetic oligonucleotide"
  source: /note="Antisense strand to SEQ ID NO: 2265"
ucagaccucacgauaccug

SEQ ID NO: 2267 - RNA, 19 nt, Artificial Sequence
  source: /note="Description of Artificial Sequence: Synthetic oligonucleotide"
  source: /note="Sense strand starting at position 2022 of SEQ ID NO: 285"
uccagugcgugcuccuuua

SEQ ID NO: 2268 - RNA, 19 nt, Artificial Sequence
  source: /note="Description of Artificial Sequence: Synthetic oligonucleotide"
  source: /note="Antisense strand to SEQ ID NO: 2267"
uaaaggagcacgcacugga

SEQ ID NO: 2269 - RNA, 19 nt, Artificial Sequence
  source: /note="Description of Artificial Sequence: Synthetic oligonucleotide"
  source: /note="Sense strand starting at position 2022 of SEQ ID NO: 292"
cgugcuccuuuagugauca

SEQ ID NO: 2270 - RNA, 19 nt, Artificial Sequence
  source: /note="Description of Artificial Sequence: Synthetic oligonucleotide"
  source: /note="Antisense strand to SEQ ID NO: 2269"
ugaucacuaaaggagcacg

SEQ ID NO: 2271 - RNA, 19 nt, Artificial Sequence
  source: /note="Description of Artificial Sequence: Synthetic oligonucleotide"
  source: /note="Sense strand starting at position 2022 of SEQ ID NO: 293"
gugcuccuuuagugaucaa

SEQ ID NO: 2272 - RNA, 19 nt, Artificial Sequence
  source: /note="Description of Artificial Sequence: Synthetic oligonucleotide"
  source: /note="Antisense strand to SEQ ID NO: 2271"
uugaucacuaaaggagcac

SEQ ID NO: 2273 - RNA, 19 nt, Artificial Sequence
  source: /note="Description of Artificial Sequence: Synthetic oligonucleotide"
  source: /note="Sense strand starting at position 2022 of SEQ ID NO: 667"
gcggaccguugauaaacau

SEQ ID NO: 2274 - RNA, 19 nt, Artificial Sequence
  source: /note="Description of Artificial Sequence: Synthetic oligonucleotide"
  source: /note="Antisense strand to SEQ ID NO: 2273"
auguuuaucaacgguccgc

SEQ ID NO: 2275 - RNA, 19 nt, Artificial Sequence
  source: /note="Description of Artificial Sequence: Synthetic oligonucleotide"
  source: /note="Sense strand starting at position 2022 of SEQ ID NO: 721"
gagggaccgcgauguauua

SEQ ID NO: 2276 - RNA, 19 nt, Artificial Sequence
  source: /note="Description of Artificial Sequence: Synthetic oligonucleotide"
  source: /note="Antisense strand to SEQ ID NO: 2275"
uaauacaucgcggucccuc

SEQ ID NO: 2277 - RNA, 19 nt, Artificial Sequence
  source: /note="Description of Artificial Sequence: Synthetic oligonucleotide"
  source: /note="Sense strand starting at position 2022 of SEQ ID NO: 733"
uguauuaaguuagggaaau

SEQ ID NO: 2278 - RNA, 19 nt, Artificial Sequence
  source: /note="Description of Artificial Sequence: Synthetic oligonucleotide"
  source: /note="Antisense strand to SEQ ID NO: 2277"
auuucccuaacuuaauaca

SEQ ID NO: 2279 - RNA, 19 nt, Artificial Sequence
  source: /note="Description of Artificial Sequence: Synthetic oligonucleotide"
  source: /note="Sense strand starting at position 2022 of SEQ ID NO: 734"
guauuaaguuagggaaauu

SEQ ID NO: 2280 - RNA, 19 nt, Artificial Sequence
  source: /note="Description of Artificial Sequence: Synthetic oligonucleotide"
  source: /note="Antisense strand to SEQ ID NO: 2279"
aauuucccuaacuuaauac

SEQ ID NO: 2281 - RNA, 19 nt, Artificial Sequence
  source: /note="Description of Artificial Sequence: Synthetic oligonucleotide"
  source: /note="Sense strand starting at position 2022 of SEQ ID NO: 743"
uagggaaauuaucggaucu

SEQ ID NO: 2282 - RNA, 19 nt, Artificial Sequence
  source: /note="Description of Artificial Sequence: Synthetic oligonucleotide"
  source: /note="Antisense strand to SEQ ID NO: 2281"
agauccgauaauuucccua

SEQ ID NO: 2283 - RNA, 19 nt, Artificial Sequence
  source: /note="Description of Artificial Sequence: Synthetic oligonucleotide"
  source: /note="Sense strand starting at position 2022 of SEQ ID NO: 745"
gggaaauuaucggaucuua

SEQ ID NO: 2284 - RNA, 19 nt, Artificial Sequence
  source: /note="Description of Artificial Sequence: Synthetic oligonucleotide"
  source: /note="Antisense strand to SEQ ID NO: 2283"
uaagauccgauaauuuccc

SEQ ID NO: 2285 - RNA, 19 nt, Artificial Sequence
  source: /note="Description of Artificial Sequence: Synthetic oligonucleotide"
  source: /note="Sense strand starting at position 2022 of SEQ ID NO: 766"
aucuccaguuucugacuua

SEQ ID NO: 2286 - RNA, 19 nt, Artificial Sequence
  source: /note="Description of Artificial Sequence: Synthetic oligonucleotide"
  source: /note="Antisense strand to SEQ ID NO: 2285"
uaagucagaaacuggagau

SEQ ID NO: 2287 - RNA, 19 nt, Artificial Sequence
  source: /note="Description of Artificial Sequence: Synthetic oligonucleotide"
  source: /note="Sense strand starting at position 2022 of SEQ ID NO: 2099"
ggguacugcugccaacaaa

SEQ ID NO: 2288 - RNA, 19 nt, Artificial Sequence
  source: /note="Description of Artificial Sequence: Synthetic oligonucleotide"
  source: /note="Antisense strand to SEQ ID NO: 2287"
uuuguuggcagcaguaccc

SEQ ID NO: 2289 - RNA, 19 nt, Artificial Sequence
  source: /note="Description of Artificial Sequence: Synthetic oligonucleotide"
  source: /note="Sense strand starting at position 2022 of SEQ ID NO: 2124"
cuggcuggccucggagaaa

SEQ ID NO: 2290 - RNA, 19 nt, Artificial Sequence
  source: /note="Description of Artificial Sequence: Synthetic oligonucleotide"
  source: /note="Antisense strand to SEQ ID NO: 2289"
uuucuccgaggccagccag

SEQ ID NO: 2291 - RNA, 19 nt, Artificial Sequence
  source: /note="Description of Artificial Sequence: Synthetic oligonucleotide"
  source: /note="Sense strand starting at position 2022 of SEQ ID NO: 2475"
augguucgcucagccuuaa

SEQ ID NO: 2292 - RNA, 19 nt, Artificial Sequence
  source: /note="Description of Artificial Sequence: Synthetic oligonucleotide"
  source: /note="Antisense strand to SEQ ID NO: 2291"
uuaaggcugagcgaaccau

SEQ ID NO: 2293 - RNA, 19 nt, Artificial Sequence
  source: /note="Description of Artificial Sequence: Synthetic oligonucleotide"
  source: /note="Sense strand starting at position 2022 of SEQ ID NO: 2494"
cccagaaguuucugccauc

SEQ ID NO: 2294 - RNA, 19 nt, Artificial Sequence
  source: /note="Description of Artificial Sequence: Synthetic oligonucleotide"
  source: /note="Antisense strand to SEQ ID NO: 2293"
gauggcagaaacuucuggg

SEQ ID NO: 2295 - RNA, 19 nt, Artificial Sequence
  source: /note="Description of Artificial Sequence: Synthetic oligonucleotide"
  source: /note="Sense strand starting at position 2022 of SEQ ID NO: 2698"
agcugucucagacacguuu

SEQ ID NO: 2296 - RNA, 19 nt, Artificial Sequence
  source: /note="Description of Artificial Sequence: Synthetic oligonucleotide"
  source: /note="Antisense strand to SEQ ID NO: 2295"
aaacgugucugagacagcu

SEQ ID NO: 2297 - RNA, 19 nt, Artificial Sequence
  source: /note="Description of Artificial Sequence: Synthetic oligonucleotide"
  source: /note="Sense strand starting at position 2022 of SEQ ID NO: 2750"
ggaucuuccuucccaagca

SEQ ID NO: 2298 - RNA, 19 nt, Artificial Sequence
  source: /note="Description of Artificial Sequence: Synthetic oligonucleotide"
  source: /note="Antisense strand to SEQ ID NO: 2297"
ugcuugggaaggaagaucc

SEQ ID NO: 2299 - RNA, 19 nt, Artificial Sequence
  source: /note="Description of Artificial Sequence: Synthetic oligonucleotide"
  source: /note="Sense strand starting at position 2022 of SEQ ID NO: 2799"
gggaacucgucccuuucua

SEQ ID NO: 2300 - RNA, 19 nt, Artificial Sequence
  source: /note="Description of Artificial Sequence: Synthetic oligonucleotide"
  source: /note="Antisense strand to SEQ ID NO: 2299"
uagaaagggacgaguuccc

SEQ ID NO: 2301 - RNA, 19 nt, Artificial Sequence
  source: /note="Description of Artificial Sequence: Synthetic oligonucleotide"
  source: /note="Sense strand starting at position 2022 of SEQ ID NO: 2821"
uucuguucuuucccgggau

SEQ ID NO: 2302 - RNA, 19 nt, Artificial Sequence
  source: /note="Description of Artificial Sequence: Synthetic oligonucleotide"
  source: /note="Antisense strand to SEQ ID NO: 2301"
aucccgggaaagaacagaa

SEQ ID NO: 2303 - RNA, 19 nt, Artificial Sequence
  source: /note="Description of Artificial Sequence: Synthetic oligonucleotide"
  source: /note="Sense strand starting at position 2022 of SEQ ID NO: 2822"
ucuguucuuucccgggauu

SEQ ID NO: 2304 - RNA, 19 nt, Artificial Sequence
  source: /note="Description of Artificial Sequence: Synthetic oligonucleotide"
  source: /note="Antisense strand to SEQ ID NO: 2303"
aaucccgggaaagaacaga

SEQ ID NO: 2305 - RNA, 19 nt, Artificial Sequence
  source: /note="Description of Artificial Sequence: Synthetic oligonucleotide"
  source: /note="Sense strand starting at position 2022 of SEQ ID NO: 2824"
uguucuuucccgggauugu

SEQ ID NO: 2306 - RNA, 19 nt, Artificial Sequence
  source: /note="Description of Artificial Sequence: Synthetic oligonucleotide"
  source: /note="Antisense strand to SEQ ID NO: 2305"
acaaucccgggaaagaaca

SEQ ID NO: 2307 - RNA, 19 nt, Artificial Sequence
  source: /note="Description of Artificial Sequence: Synthetic oligonucleotide"
  source: /note="Sense strand starting at position 2022 of SEQ ID NO: 2825"
guucuuucccgggauugua

SEQ ID NO: 2308 - RNA, 19 nt, Artificial Sequence
  source: /note="Description of Artificial Sequence: Synthetic oligonucleotide"
  source: /note="Antisense strand to SEQ ID NO: 2307"
uacaaucccgggaaagaac

SEQ ID NO: 2309 - RNA, 19 nt, Artificial Sequence
  source: /note="Description of Artificial Sequence: Synthetic oligonucleotide"
  source: /note="Sense strand starting at position 2022 of SEQ ID NO: 2841"
guagcaguuuccucuaccu

SEQ ID NO: 2310 - RNA, 19 nt, Artificial Sequence
  source: /note="Description of Artificial Sequence: Synthetic oligonucleotide"
  source: /note="Antisense strand to SEQ ID NO: 2309"
agguagaggaaacugcuac

SEQ ID NO: 2311 - RNA, 19 nt, Artificial Sequence
  source: /note="Description of Artificial Sequence: Synthetic oligonucleotide"
  source: /note="Sense strand starting at position 2022 of SEQ ID NO: 2843"
agcaguuuccucuaccuga

SEQ ID NO: 2312 - RNA, 19 nt, Artificial Sequence
  source: /note="Description of Artificial Sequence: Synthetic oligonucleotide"
  source: /note="Antisense strand to SEQ ID NO: 2311"
ucagguagaggaaacugcu

SEQ ID NO: 2313 - RNA, 19 nt, Artificial Sequence
  source: /note="Description of Artificial Sequence: Synthetic oligonucleotide"
  source: /note="Sense strand starting at position 2022 of SEQ ID NO: 3048"
uguccuaacguccgauacu

SEQ ID NO: 2314 - RNA, 19 nt, Artificial Sequence
  source: /note="Description of Artificial Sequence: Synthetic oligonucleotide"
  source: /note="Antisense strand to SEQ ID NO: 2313"
aguaucggacguuaggaca

SEQ ID NO: 2315 - RNA, 19 nt, Artificial Sequence
  source: /note="Description of Artificial Sequence: Synthetic oligonucleotide"
  source: /note="Sense strand starting at position 2022 of SEQ ID NO: 3049"
guccuaacguccgauacua

SEQ ID NO: 2316 - RNA, 19 nt, Artificial Sequence
  source: /note="Description of Artificial Sequence: Synthetic oligonucleotide"
  source: /note="Antisense strand to SEQ ID NO: 2315"
uaguaucggacguuaggac

SEQ ID NO: 2317 - RNA, 19 nt, Artificial Sequence
  source: /note="Description of Artificial Sequence: Synthetic oligonucleotide"
  source: /note="Sense strand starting at position 2022 of SEQ ID NO: 3057"
guccgauacuaguauucca

SEQ ID NO: 2318 - RNA, 19 nt, Artificial Sequence
  source: /note="Description of Artificial Sequence: Synthetic oligonucleotide"
  source: /note="Antisense strand to SEQ ID NO: 2317"
uggaauacuaguaucggac

SEQ ID NO: 2319 - RNA, 19 nt, Artificial Sequence
  source: /note="Description of Artificial Sequence: Synthetic oligonucleotide"
  source: /note="Sense strand starting at position 2022 of SEQ ID NO: 3062"
auacuaguauuccagcguu

SEQ ID NO: 2320 - RNA, 19 nt, Artificial Sequence
  source: /note="Description of Artificial Sequence: Synthetic oligonucleotide"
  source: /note="Antisense strand to SEQ ID NO: 2319"
aacgcuggaauacuaguau

SEQ ID NO: 2321 - RNA, 19 nt, Artificial Sequence
  source: /note="Description of Artificial Sequence: Synthetic oligonucleotide"
  source: /note="Sense strand starting at position 2022 of SEQ ID NO: 3065"
cuaguauuccagcguuucu

SEQ ID NO: 2322 - RNA, 19 nt, Artificial Sequence
  source: /note="Description of Artificial Sequence: Synthetic oligonucleotide"
  source: /note="Antisense strand to SEQ ID NO: 2321"
agaaacgcuggaauacuag

SEQ ID NO: 2323 - RNA, 19 nt, Artificial Sequence
  source: /note="Description of Artificial Sequence: Synthetic oligonucleotide"
  source: /note="Sense strand starting at position 2022 of SEQ ID NO: 3225"
acccaucaucuugguuuga

SEQ ID NO: 2324 - RNA, 19 nt, Artificial Sequence
  source: /note="Description of Artificial Sequence: Synthetic oligonucleotide"
  source: /note="Antisense strand to SEQ ID NO: 2323"
ucaaaccaagaugaugggu

SEQ ID NO: 2325 - RNA, 19 nt, Artificial Sequence
  source: /note="Description of Artificial Sequence: Synthetic oligonucleotide"
  source: /note="Sense strand starting at position 2022 of SEQ ID NO: 3234"
cuugguuugagccaaaguu

SEQ ID NO: 2326 - RNA, 19 nt, Artificial Sequence
  source: /note="Description of Artificial Sequence: Synthetic oligonucleotide"
  source: /note="Antisense strand to SEQ ID NO: 2325"
aacuuuggcucaaaccaag

SEQ ID NO: 2327 - RNA, 19 nt, Artificial Sequence
  source: /note="Description of Artificial Sequence: Synthetic oligonucleotide"
  source: /note="Sense strand starting at position 2022 of SEQ ID NO: 3243"
agccaaaguuaaugcauuu

SEQ ID NO: 2328 - RNA, 19 nt, Artificial Sequence
  source: /note="Description of Artificial Sequence: Synthetic oligonucleotide"
  source: /note="Antisense strand to SEQ ID NO: 2327"
aaaugcauuaacuuuggcu

SEQ ID NO: 2329 - RNA, 19 nt, Artificial Sequence
  source: /note="Description of Artificial Sequence: Synthetic oligonucleotide"
  source: /note="Sense strand starting at position 2022 of SEQ ID NO: 3328"
agaugagcuugauguguag

SEQ ID NO: 2330 - RNA, 19 nt, Artificial Sequence
  source: /note="Description of Artificial Sequence: Synthetic oligonucleotide"
  source: /note="Antisense strand to SEQ ID NO: 2329"
cuacacaucaagcucaucu

SEQ ID NO: 2331 - RNA, 19 nt, Artificial Sequence
  source: /note="Description of Artificial Sequence: Synthetic oligonucleotide"
  source: /note="Sense strand starting at position 2022 of SEQ ID NO: 3359"
gccacaucuuguccacuuu

SEQ ID NO: 2332 - RNA, 19 nt, Artificial Sequence
  source: /note="Description of Artificial Sequence: Synthetic oligonucleotide"
  source: /note="Antisense strand to SEQ ID NO: 2331"
aaaguggacaagauguggc

SEQ ID NO: 2333 - RNA, 19 nt, Artificial Sequence
  source: /note="Description of Artificial Sequence: Synthetic oligonucleotide"
  source: /note="Sense strand starting at position 2022 of SEQ ID NO: 3380"
gugccuaccucaucucaua

SEQ ID NO: 2334 - RNA, 19 nt, Artificial Sequence
  source: /note="Description of Artificial Sequence: Synthetic oligonucleotide"
  source: /note="Antisense strand to SEQ ID NO: 2333"
uaugagaugagguaggcac

SEQ ID NO: 2335 - RNA, 19 nt, Artificial Sequence
  source: /note="Description of Artificial Sequence: Synthetic oligonucleotide"
  source: /note="Sense strand starting at position 2022 of SEQ ID NO: 3430"
ucgggacccugugguuuaa

SEQ ID NO: 2336 - RNA, 19 nt, Artificial Sequence
  source: /note="Description of Artificial Sequence: Synthetic oligonucleotide"
  source: /note="Antisense strand to SEQ ID NO: 2335"
uuaaaccacagggucccga

SEQ ID NO: 2337 - RNA, 19 nt, Artificial Sequence
  source: /note="Description of Artificial Sequence: Synthetic oligonucleotide"
  source: /note="Sense strand starting at position 2022 of SEQ ID NO: 3483"
cagagagguuuccugucca

SEQ ID NO: 2338 - RNA, 19 nt, Artificial Sequence
  source: /note="Description of Artificial Sequence: Synthetic oligonucleotide"
  source: /note="Antisense strand to SEQ ID NO: 2337"
uggacaggaaaccucucug

SEQ ID NO: 2339 - RNA, 19 nt, Artificial Sequence
  source: /note="Description of Artificial Sequence: Synthetic oligonucleotide"
  source: /note="Sense strand starting at position 2022 of SEQ ID NO: 3490"
guuuccuguccagggacau

SEQ ID NO: 2340 - RNA, 19 nt, Artificial Sequence
  source: /note="Description of Artificial Sequence: Synthetic oligonucleotide"
  source: /note="Antisense strand to SEQ ID NO: 2339"
augucccuggacaggaaac

SEQ ID NO: 2341 - RNA, 19 nt, Artificial Sequence
  source: /note="Description of Artificial Sequence: Synthetic oligonucleotide"
  source: /note="Sense strand starting at position 2022 of SEQ ID NO: 3617"
gucugaguuugauugugcu

SEQ ID NO: 2342 - RNA, 19 nt, Artificial Sequence
  source: /note="Description of Artificial Sequence: Synthetic oligonucleotide"
  source: /note="Antisense strand to SEQ ID NO: 2341"
agcacaaucaaacucagac

SEQ ID NO: 2343 - RNA, 19 nt, Artificial Sequence
  source: /note="Description of Artificial Sequence: Synthetic oligonucleotide"
  source: /note="Sense strand starting at position 2022 of SEQ ID NO: 3620"
ugaguuugauugugcugua

SEQ ID NO: 2344 - RNA, 19 nt, Artificial Sequence
  source: /note="Description of Artificial Sequence: Synthetic oligonucleotide"
  source: /note="Antisense strand to SEQ ID NO: 2343"
uacagcacaaucaaacuca

SEQ ID NO: 2345 - RNA, 19 nt, Artificial Sequence
  source: /note="Description of Artificial Sequence: Synthetic oligonucleotide"
  source: /note="Sense strand starting at position 2022 of SEQ ID NO: 3645"
agguccugcugucuuacaa

SEQ ID NO: 2346 - RNA, 19 nt, Artificial Sequence
  source: /note="Description of Artificial Sequence: Synthetic oligonucleotide"
  source: /note="Antisense strand to SEQ ID NO: 2345"
uuguaagacagcaggaccu

SEQ ID NO: 2347 - RNA, 19 nt, Artificial Sequence
  source: /note="Description of Artificial Sequence: Synthetic oligonucleotide"
  source: /note="Sense strand starting at position 2022 of SEQ ID NO: 3649"
ccugcugucuuacaaguga

SEQ ID NO: 2348 - RNA, 19 nt, Artificial Sequence
  source: /note="Description of Artificial Sequence: Synthetic oligonucleotide"
  source: /note="Antisense strand to SEQ ID NO: 2347"
ucacuuguaagacagcagg

SEQ ID NO: 2349 - RNA, 19 nt, Artificial Sequence
  source: /note="Description of Artificial Sequence: Synthetic oligonucleotide"
  source: /note="Sense strand starting at position 2022 of SEQ ID NO: 3702"
ugcagauguuuccuugaug

SEQ ID NO: 2350 - RNA, 19 nt, Artificial Sequence
  source: /note="Description of Artificial Sequence: Synthetic oligonucleotide"
  source: /note="Antisense strand to SEQ ID NO: 2349"
caucaaggaaacaucugca

SEQ ID NO: 2351 - RNA, 19 nt, Artificial Sequence
  source: /note="Description of Artificial Sequence: Synthetic oligonucleotide"
  source: /note="Sense strand starting at position 2022 of SEQ ID NO: 3723"
gccuguggucacugauauu

SEQ ID NO: 2352 - RNA, 19 nt, Artificial Sequence
  source: /note="Description of Artificial Sequence: Synthetic oligonucleotide"
  source: /note="Antisense strand to SEQ ID NO: 2351"
aauaucagugaccacaggc

SEQ ID NO: 2353 - RNA, 19 nt, Artificial Sequence
  source: /note="Description of Artificial Sequence: Synthetic oligonucleotide"
  source: /note="Sense strand starting at position 2022 of SEQ ID NO: 3726"
uguggucacugauauuuaa

SEQ ID NO: 2354 - RNA, 19 nt, Artificial Sequence
  source: /note="Description of Artificial Sequence: Synthetic oligonucleotide"
  source: /note="Antisense strand to SEQ ID NO: 2353"
uuaaauaucagugaccaca

SEQ ID NO: 2355 - RNA, 19 nt, Artificial Sequence
  source: /note="Description of Artificial Sequence: Synthetic oligonucleotide"
  source: /note="Sense strand starting at position 2022 of SEQ ID NO: 3751"
cugucuugagccuguggua

SEQ ID NO: 2356 - RNA, 19 nt, Artificial Sequence
  source: /note="Description of Artificial Sequence: Synthetic oligonucleotide"
  source: /note="Antisense strand to SEQ ID NO: 2355"
uaccacaggcucaagacag

SEQ ID NO: 2357 - RNA, 19 nt, Artificial Sequence
  source: /note="Description of Artificial Sequence: Synthetic oligonucleotide"
  source: /note="Sense strand starting at position 2022 of SEQ ID NO: 3754"
ucuugagccugugguauca

SEQ ID NO: 2358 - RNA, 19 nt, Artificial Sequence
  source: /note="Description of Artificial Sequence: Synthetic oligonucleotide"
  source: /note="Antisense strand to SEQ ID NO: 2357"
ugauaccacaggcucaaga

SEQ ID NO: 2359 - RNA, 19 nt, Artificial Sequence
  source: /note="Description of Artificial Sequence: Synthetic oligonucleotide"
  source: /note="Sense strand starting at position 2022 of SEQ ID NO: 3914"
gucucauccucuuuaguuu

SEQ ID NO: 2360 - RNA, 19 nt, Artificial Sequence
  source: /note="Description of Artificial Sequence: Synthetic oligonucleotide"
  source: /note="Antisense strand to SEQ ID NO: 2359"
aaacuaaagaggaugagac

SEQ ID NO: 2361 - RNA, 19 nt, Artificial Sequence
  source: /note="Description of Artificial Sequence: Synthetic oligonucleotide"
  source: /note="Sense strand starting at position 2030 of SEQ ID NO: 229"
agcguucucuugcgauuug

SEQ ID NO: 2362 - RNA, 19 nt, Artificial Sequence
  source: /note="Description of Artificial Sequence: Synthetic oligonucleotide"
  source: /note="Antisense strand to SEQ ID NO: 2361"
caaaucgcaagagaacgcu

SEQ ID NO: 2363 - RNA, 19 nt, Artificial Sequence
  source: /note="Description of Artificial Sequence: Synthetic oligonucleotide"
  source: /note="Sense strand starting at position 2030 of SEQ ID NO: 252"
ggauuagaguuugguuuca

SEQ ID NO: 2364 - RNA, 19 nt, Artificial Sequence
  source: /note="Description of Artificial Sequence: Synthetic oligonucleotide"
  source: /note="Antisense strand to SEQ ID NO: 2363"
ugaaaccaaacucuaaucc

SEQ ID NO: 2365 - RNA, 19 nt, Artificial Sequence
  source: /note="Description of Artificial Sequence: Synthetic oligonucleotide"
  source: /note="Sense strand starting at position 2030 of SEQ ID NO: 312"
ucccuuuaaucugaggauc

SEQ ID NO: 2366 - RNA, 19 nt, Artificial Sequence
  source: /note="Description of Artificial Sequence: Synthetic oligonucleotide"
  source: /note="Antisense strand to SEQ ID NO: 2365"
gauccucagauuaaaggga

SEQ ID NO: 2367 - RNA, 19 nt, Artificial Sequence
  source: /note="Description of Artificial Sequence: Synthetic oligonucleotide"
  source: /note="Sense strand starting at position 2030 of SEQ ID NO: 314"
ccuuuaaucugaggaucag

SEQ ID NO: 2368 - RNA, 19 nt, Artificial Sequence
  source: /note="Description of Artificial Sequence: Synthetic oligonucleotide"
  source: /note="Antisense strand to SEQ ID NO: 2367"
cugauccucagauuaaagg

SEQ ID NO: 2369 - RNA, 19 nt, Artificial Sequence
  source: /note="Description of Artificial Sequence: Synthetic oligonucleotide"
  source: /note="Sense strand starting at position 2030 of SEQ ID NO: 356"
gcauuugcgugcugaauug

SEQ ID NO: 2370 - RNA, 19 nt, Artificial Sequence
  source: /note="Description of Artificial Sequence: Synthetic oligonucleotide"
  source: /note="Antisense strand to SEQ ID NO: 2369"
caauucagcacgcaaaugc

SEQ ID NO: 2371 - RNA, 19 nt, Artificial Sequence
  source: /note="Description of Artificial Sequence: Synthetic oligonucleotide"
  source: /note="Sense strand starting at position 2030 of SEQ ID NO: 363"
cgugcugaauuguugaacu

SEQ ID NO: 2372 - RNA, 19 nt, Artificial Sequence
  source: /note="Description of Artificial Sequence: Synthetic oligonucleotide"
  source: /note="Antisense strand to SEQ ID NO: 2371"
aguucaacaauucagcacg

SEQ ID NO: 2373 - RNA, 19 nt, Artificial Sequence
  source: /note="Description of Artificial Sequence: Synthetic oligonucleotide"
  source: /note="Sense strand starting at position 2030 of SEQ ID NO: 382"
uggcuugcauugcuggaau

SEQ ID NO: 2374 - RNA, 19 nt, Artificial Sequence
  source: /note="Description of Artificial Sequence: Synthetic oligonucleotide"
  source: /note="Antisense strand to SEQ ID NO: 2373"
auuccagcaaugcaagcca

SEQ ID NO: 2375 - RNA, 19 nt, Artificial Sequence
  source: /note="Description of Artificial Sequence: Synthetic oligonucleotide"
  source: /note="Sense strand starting at position 2030 of SEQ ID NO: 539"
uuuauucugucuggcuaaa

SEQ ID NO: 2376 - RNA, 19 nt, Artificial Sequence
  source: /note="Description of Artificial Sequence: Synthetic oligonucleotide"
  source: /note="Antisense strand to SEQ ID NO: 2375"
uuuagccagacagaauaaa

SEQ ID NO: 2377 - RNA, 19 nt, Artificial Sequence
  source: /note="Description of Artificial Sequence: Synthetic oligonucleotide"
  source: /note="Sense strand starting at position 2030 of SEQ ID NO: 584"
ggcuguuccagcuguuagu

SEQ ID NO: 2378 - RNA, 19 nt, Artificial Sequence
  source: /note="Description of Artificial Sequence: Synthetic oligonucleotide"
  source: /note="Antisense strand to SEQ ID NO: 2377"
acuaacagcuggaacagcc

SEQ ID NO: 2379 - RNA, 19 nt, Artificial Sequence
  source: /note="Description of Artificial Sequence: Synthetic oligonucleotide"
  source: /note="Sense strand starting at position 2030 of SEQ ID NO: 932"
agaagaguuuauugcccaa

SEQ ID NO: 2380 - RNA, 19 nt, Artificial Sequence
  source: /note="Description of Artificial Sequence: Synthetic oligonucleotide"
  source: /note="Antisense strand to SEQ ID NO: 2379"
uugggcaauaaacucuucu

SEQ ID NO: 2381 - RNA, 19 nt, Artificial Sequence
  source: /note="Description of Artificial Sequence: Synthetic oligonucleotide"
  source: /note="Sense strand starting at position 2030 of SEQ ID NO: 994"
ccacuuaaaucggauggau

SEQ ID NO: 2382 - RNA, 19 nt, Artificial Sequence
  source: /note="Description of Artificial Sequence: Synthetic oligonucleotide"
  source: /note="Antisense strand to SEQ ID NO: 2381"
auccauccgauuuaagugg

SEQ ID NO: 2383 - RNA, 19 nt, Artificial Sequence
  source: /note="Description of Artificial Sequence: Synthetic oligonucleotide"
  source: /note="Sense strand starting at position 2030 of SEQ ID NO: 1120"
agcaaaguguucugcccuu

SEQ ID NO: 2384 - RNA, 19 nt, Artificial Sequence
  source: /note="Description of Artificial Sequence: Synthetic oligonucleotide"
  source: /note="Antisense strand to SEQ ID NO: 2383"
aagggcagaacacuuugcu

SEQ ID NO: 2385 - RNA, 19 nt, Artificial Sequence
  source: /note="Description of Artificial Sequence: Synthetic oligonucleotide"
  source: /note="Sense strand starting at position 2030 of SEQ ID NO: 1599"
gcgugaggaacgcguuauc

SEQ ID NO: 2386 - RNA, 19 nt, Artificial Sequence
  source: /note="Description of Artificial Sequence: Synthetic oligonucleotide"
  source: /note="Antisense strand to SEQ ID NO: 2385"
gauaacgcguuccucacgc

SEQ ID NO: 2387 - RNA, 19 nt, Artificial Sequence
  source: /note="Description of Artificial Sequence: Synthetic oligonucleotide"
  source: /note="Sense strand starting at position 2030 of SEQ ID NO: 2454"
auuaaaguggccggcgaua

SEQ ID NO: 2388 - RNA, 19 nt, Artificial Sequence
  source: /note="Description of Artificial Sequence: Synthetic oligonucleotide"
  source: /note="Antisense strand to SEQ ID NO: 2387"
uaucgccggccacuuuaau

SEQ ID NO: 2389 - RNA, 19 nt, Artificial Sequence
  source: /note="Description of Artificial Sequence: Synthetic oligonucleotide"
  source: /note="Sense strand starting at position 2030 of SEQ ID NO: 2602"
cugcgaacuucuuagaaau

SEQ ID NO: 2390 - RNA, 19 nt, Artificial Sequence
  source: /note="Description of Artificial Sequence: Synthetic oligonucleotide"
  source: /note="Antisense strand to SEQ ID NO: 2389"
auuucuaagaaguucgcag

SEQ ID NO: 2391 - RNA, 19 nt, Artificial Sequence
  source: /note="Description of Artificial Sequence: Synthetic oligonucleotide"
  source: /note="Sense strand starting at position 2030 of SEQ ID NO: 2604"
gcgaacuucuuagaaauga

SEQ ID NO: 2392 - RNA, 19 nt, Artificial Sequence
  source: /note="Description of Artificial Sequence: Synthetic oligonucleotide"
  source: /note="Antisense strand to SEQ ID NO: 2391"
ucauuucuaagaaguucgc

SEQ ID NO: 2393 - RNA, 19 nt, Artificial Sequence
  source: /note="Description of Artificial Sequence: Synthetic oligonucleotide"
  source: /note="Sense strand starting at position 2030 of SEQ ID NO: 2654"
accagaaacucugagcaua

SEQ ID NO: 2394 - RNA, 19 nt, Artificial Sequence
  source: /note="Description of Artificial Sequence: Synthetic oligonucleotide"
  source: /note="Antisense strand to SEQ ID NO: 2393"
uaugcucagaguuucuggu

SEQ ID NO: 2395 - RNA, 19 nt, Artificial Sequence
  source: /note="Description of Artificial Sequence: Synthetic oligonucleotide"
  source: /note="Sense strand starting at position 2030 of SEQ ID NO: 2662"
cucugagcauacuaauguu

SEQ ID NO: 2396 - RNA, 19 nt, Artificial Sequence
  source: /note="Description of Artificial Sequence: Synthetic oligonucleotide"
  source: /note="Antisense strand to SEQ ID NO: 2395"
aacauuaguaugcucagag

SEQ ID NO: 2397 - RNA, 19 nt, Artificial Sequence
  source: /note="Description of Artificial Sequence: Synthetic oligonucleotide"
  source: /note="Sense strand starting at position 2030 of SEQ ID NO: 2665"
ugagcauacuaauguuuga

SEQ ID NO: 2398 - RNA, 19 nt, Artificial Sequence
  source: /note="Description of Artificial Sequence: Synthetic oligonucleotide"
  source: /note="Antisense strand to SEQ ID NO: 2397"
ucaaacauuaguaugcuca

SEQ ID NO: 2399 - RNA, 19 nt, Artificial Sequence
  source: /note="Description of Artificial Sequence: Synthetic oligonucleotide"
  source: /note="Sense strand starting at position 2030 of SEQ ID NO: 2736"
acgguuugguccuuuagua

SEQ ID NO: 2400 - RNA, 19 nt, Artificial Sequence
  source: /note="Description of Artificial Sequence: Synthetic oligonucleotide"
  source: /note="Antisense strand to SEQ ID NO: 2399"
uacuaaaggaccaaaccgu

SEQ ID NO: 2401 - RNA, 19 nt, Artificial Sequence
  source: /note="Description of Artificial Sequence: Synthetic oligonucleotide"
  source: /note="Sense strand starting at position 2030 of SEQ ID NO: 2776"
ggaacuuguuucuaauaga

SEQ ID NO: 2402 - RNA, 19 nt, Artificial Sequence
  source: /note="Description of Artificial Sequence: Synthetic oligonucleotide"
  source: /note="Antisense strand to SEQ ID NO: 2401"
ucuauuagaaacaaguucc

SEQ ID NO: 2403 - RNA, 19 nt, Artificial Sequence
  source: /note="Description of Artificial Sequence: Synthetic oligonucleotide"
  source: /note="Sense strand starting at position 2030 of SEQ ID NO: 2852"
uuugcaguaugaugauaga

SEQ ID NO: 2404 - RNA, 19 nt, Artificial Sequence
  source: /note="Description of Artificial Sequence: Synthetic oligonucleotide"
  source: /note="Antisense strand to SEQ ID NO: 2403"
ucuaucaucauacugcaaa

SEQ ID NO: 2405 - RNA, 19 nt, Artificial Sequence
  source: /note="Description of Artificial Sequence: Synthetic oligonucleotide"
  source: /note="Sense strand starting at position 2030 of SEQ ID NO: 2855"
gcaguaugaugauagaagu

SEQ ID NO: 2406 - RNA, 19 nt, Artificial Sequence
  source: /note="Description of Artificial Sequence: Synthetic oligonucleotide"
  source: /note="Antisense strand to SEQ ID NO: 2405"
acuucuaucaucauacugc

SEQ ID NO: 2407 - RNA, 19 nt, Artificial Sequence
  source: /note="Description of Artificial Sequence: Synthetic oligonucleotide"
  source: /note="Sense strand starting at position 2030 of SEQ ID NO: 2984"
agagcaucuuacgauaaac

SEQ ID NO: 2408 - RNA, 19 nt, Artificial Sequence
  source: /note="Description of Artificial Sequence: Synthetic oligonucleotide"
  source: /note="Antisense strand to SEQ ID NO: 2407"
guuuaucguaagaugcucu

SEQ ID NO: 2409 - RNA, 19 nt, Artificial Sequence
  source: /note="Description of Artificial Sequence: Synthetic oligonucleotide"
  source: /note="Sense strand starting at position 2030 of SEQ ID NO: 2994"
acgauaaacuguuagugau

SEQ ID NO: 2410 - RNA, 19 nt, Artificial Sequence
  source: /note="Description of Artificial Sequence: Synthetic oligonucleotide"
  source: /note="Antisense strand to SEQ ID NO: 2409"
aucacuaacaguuuaucgu

SEQ ID NO: 2411 - RNA, 19 nt, Artificial Sequence
  source: /note="Description of Artificial Sequence: Synthetic oligonucleotide"
  source: /note="Sense strand starting at position 2030 of SEQ ID NO: 3090"
acucuccuuuccgauugau

SEQ ID NO: 2412 - RNA, 19 nt, Artificial Sequence
  source: /note="Description of Artificial Sequence: Synthetic oligonucleotide"
  source: /note="Antisense strand to SEQ ID NO: 2411"
aucaaucggaaaggagagu

SEQ ID NO: 2413 - RNA, 19 nt, Artificial Sequence
  source: /note="Description of Artificial Sequence: Synthetic oligonucleotide"
  source: /note="Sense strand starting at position 2030 of SEQ ID NO: 3242"
ccaagugccugcgaugaca

SEQ ID NO: 2414 - RNA, 19 nt, Artificial Sequence
  source: /note="Description of Artificial Sequence: Synthetic oligonucleotide"
  source: /note="Antisense strand to SEQ ID NO: 2413"
ugucaucgcaggcacuugg

SEQ ID NO: 2415 - RNA, 19 nt, Artificial Sequence
  source: /note="Description of Artificial Sequence: Synthetic oligonucleotide"
  source: /note="Sense strand starting at position 2030 of SEQ ID NO: 3464"
gguaaauguuaucacuaaa

SEQ ID NO: 2416 - RNA, 19 nt, Artificial Sequence
  source: /note="Description of Artificial Sequence: Synthetic oligonucleotide"
  source: /note="Antisense strand to SEQ ID NO: 2415"
uuuagugauaacauuuacc

SEQ ID NO: 2417 - RNA, 19 nt, Artificial Sequence
  source: /note="Description of Artificial Sequence: Synthetic oligonucleotide"
  source: /note="Sense strand starting at position 2030 of SEQ ID NO: 3490"
gcauguaaguaugaucggu

SEQ ID NO: 2418 - RNA, 19 nt, Artificial Sequence
  source: /note="Description of Artificial Sequence: Synthetic oligonucleotide"
  source: /note="Antisense strand to SEQ ID NO: 2417"
accgaucauacuuacaugc

SEQ ID NO: 2419 - RNA, 19 nt, Artificial Sequence
  source: /note="Description of Artificial Sequence: Synthetic oligonucleotide"
  source: /note="Sense strand starting at position 2030 of SEQ ID NO: 3499"
uaugaucgguauugcuauu

SEQ ID NO: 2420 - RNA, 19 nt, Artificial Sequence
  source: /note="Description of Artificial Sequence: Synthetic oligonucleotide"
  source: /note="Antisense strand to SEQ ID NO: 2419"
aauagcaauaccgaucaua

SEQ ID NO: 2421 - RNA, 19 nt, Artificial Sequence
  source: /note="Description of Artificial Sequence: Synthetic oligonucleotide"
  source: /note="Sense strand starting at position 2030 of SEQ ID NO: 3530"
uggcacuucuucuggcauu

SEQ ID NO: 2422 - RNA, 19 nt, Artificial Sequence
  source: /note="Description of Artificial Sequence: Synthetic oligonucleotide"
  source: /note="Antisense strand to SEQ ID NO: 2421"
aaugccagaagaagugcca

SEQ ID NO: 2423 - RNA, 19 nt, Artificial Sequence
  source: /note="Description of Artificial Sequence: Synthetic oligonucleotide"
  source: /note="Sense strand starting at position 2030 of SEQ ID NO: 3647"
aagauuugcuuuggcugaa

SEQ ID NO: 2424 - RNA, 19 nt, Artificial Sequence
  source: /note="Description of Artificial Sequence: Synthetic oligonucleotide"
  source: /note="Antisense strand to SEQ ID NO: 2423"
uucagccaaagcaaaucuu

SEQ ID NO: 2425 - RNA, 19 nt, Artificial Sequence
  source: /note="Description of Artificial Sequence: Synthetic oligonucleotide"
  source: /note="Sense strand starting at position 2030 of SEQ ID NO: 3721"
ggauuaguguccuguaaug

SEQ ID NO: 2426 - RNA, 19 nt, Artificial Sequence
  source: /note="Description of Artificial Sequence: Synthetic oligonucleotide"
  source: /note="Antisense strand to SEQ ID NO: 2425"
cauuacaggacacuaaucc

SEQ ID NO: 2427 - RNA, 19 nt, Artificial Sequence
  source: /note="Description of Artificial Sequence: Synthetic oligonucleotide"
  source: /note="Sense strand starting at position 2030 of SEQ ID NO: 3726"
aguguccuguaaugaggaa

SEQ ID NO: 2428 - RNA, 19 nt, Artificial Sequence
  source: /note="Description of Artificial Sequence: Synthetic oligonucleotide"
  source: /note="Antisense strand to SEQ ID NO: 2427"
uuccucauuacaggacacu

SEQ ID NO: 2429 - RNA, 19 nt, Artificial Sequence
  source: /note="Description of Artificial Sequence: Synthetic oligonucleotide"
  source: /note="Sense strand starting at position 2030 of SEQ ID NO: 3744"
aguagugcccuuugcagua

SEQ ID NO: 2430 - RNA, 19 nt, Artificial Sequence
  source: /note="Description of Artificial Sequence: Synthetic oligonucleotide"
  source: /note="Antisense strand to SEQ ID NO: 2429"
uacugcaaagggcacuacu

SEQ ID NO: 2431 - RNA, 19 nt, Artificial Sequence
  source: /note="Description of Artificial Sequence: Synthetic oligonucleotide"
  source: /note="Sense strand starting at position 2030 of SEQ ID NO: 3781"
cugugucaguguggcaaau

SEQ ID NO: 2432 - RNA, 19 nt, Artificial Sequence
  source: /note="Description of Artificial Sequence: Synthetic oligonucleotide"
  source: /note="Antisense strand to SEQ ID NO: 2431"
auuugccacacugacacag

SEQ ID NO: 2433 - RNA, 19 nt, Artificial Sequence
  source: /note="Description of Artificial Sequence: Synthetic oligonucleotide"
  source: /note="Sense strand starting at position 2030 of SEQ ID NO: 3783"
gugucaguguggcaaauca

SEQ ID NO: 2434 - RNA, 19 nt, Artificial Sequence
  source: /note="Description of Artificial Sequence: Synthetic oligonucleotide"
  source: /note="Antisense strand to SEQ ID NO: 2433"
ugauuugccacacugacac

SEQ ID NO: 2435 - RNA, 19 nt, Artificial Sequence
  source: /note="Description of Artificial Sequence: Synthetic oligonucleotide"
  source: /note="Sense strand starting at position 2029 of SEQ ID NO: 16"
aguaacuacucccgucauu

SEQ ID NO: 2436 - RNA, 19 nt, Artificial Sequence
  source: /note="Description of Artificial Sequence: Synthetic oligonucleotide"
  source: /note="Antisense strand to SEQ ID NO: 2435"
aaugacgggaguaguuacu

SEQ ID NO: 2437 - RNA, 19 nt, Artificial Sequence
  source: /note="Description of Artificial Sequence: Synthetic oligonucleotide"
  source: /note="Sense strand starting at position 2029 of SEQ ID NO: 36"
aguguauacucccauaacu

SEQ ID NO: 2438 - RNA, 19 nt, Artificial Sequence
  source: /note="Description of Artificial Sequence: Synthetic oligonucleotide"
  source: /note="Antisense strand to SEQ ID NO: 2437"
aguuaugggaguauacacu

SEQ ID NO: 2439 - RNA, 19 nt, Artificial Sequence
  source: /note="Description of Artificial Sequence: Synthetic oligonucleotide"
  source: /note="Sense strand starting at position 2026 of SEQ ID NO: 315"
cagcgagcuugguggcaua

SEQ ID NO: 2440 - RNA, 19 nt, Artificial Sequence
  source: /note="Description of Artificial Sequence: Synthetic oligonucleotide"
  source: /note="Antisense strand to SEQ ID NO: 2439"
uaugccaccaagcucgcug

SEQ ID NO: 2441 - RNA, 19 nt, Artificial Sequence
  source: /note="Description of Artificial Sequence: Synthetic oligonucleotide"
  source: /note="Sense strand starting at position 2029 of SEQ ID NO: 396"
augugaguauacuacaacu

SEQ ID NO: 2442 - RNA, 19 nt, Artificial Sequence
  source: /note="Description of Artificial Sequence: Synthetic oligonucleotide"
  source: /note="Antisense strand to SEQ ID NO: 2441"
aguuguaguauacucacau

SEQ ID NO: 2443 - RNA, 19 nt, Artificial Sequence
  source: /note="Description of Artificial Sequence: Synthetic oligonucleotide"
  source: /note="Sense strand starting at position 2029 of SEQ ID NO: 417"
aagcuuaguuuacagagga

SEQ ID NO: 2444 - RNA, 19 nt, Artificial Sequence
  source: /note="Description of Artificial Sequence: Synthetic oligonucleotide"
  source: /note="Antisense strand to SEQ ID NO: 2443"
uccucuguaaacuaagcuu

SEQ ID NO: 2445 - RNA, 19 nt, Artificial Sequence
  source: /note="Description of Artificial Sequence: Synthetic oligonucleotide"
  source: /note="Sense strand starting at position 2029 of SEQ ID NO: 526"
auuauaauguguuacaggu

SEQ ID NO: 2446 - RNA, 19 nt, Artificial Sequence
  source: /note="Description of Artificial Sequence: Synthetic oligonucleotide"
  source: /note="Antisense strand to SEQ ID NO: 2445"
accuguaacacauuauaau

SEQ ID NO: 2447 - RNA, 19 nt, Artificial Sequence
  source: /note="Description of Artificial Sequence: Synthetic oligonucleotide"
  source: /note="Sense strand starting at position 2029 of SEQ ID NO: 752"
gcaugucuccuauguuuau

SEQ ID NO: 2448 - RNA, 19 nt, Artificial Sequence
  source: /note="Description of Artificial Sequence: Synthetic oligonucleotide"
  source: /note="Antisense strand to SEQ ID NO: 2447"
auaaacauaggagacaugc

SEQ ID NO: 2449 - RNA, 19 nt, Artificial Sequence
  source: /note="Description of Artificial Sequence: Synthetic oligonucleotide"
  source: /note="Sense strand starting at position 2029 of SEQ ID NO: 855"
agugaaucauucugaaauu

SEQ ID NO: 2450 - RNA, 19 nt, Artificial Sequence
  source: /note="Description of Artificial Sequence: Synthetic oligonucleotide"
  source: /note="Antisense strand to SEQ ID NO: 2449"
aauuucagaaugauucacu

SEQ ID NO: 2451 - RNA, 19 nt, Artificial Sequence
  source: /note="Description of Artificial Sequence: Synthetic oligonucleotide"
  source: /note="Sense strand starting at position 2029 of SEQ ID NO: 900"
accaguuacuugugcuaag

SEQ ID NO: 2452 - RNA, 19 nt, Artificial Sequence
  source: /note="Description of Artificial Sequence: Synthetic oligonucleotide"
  source: /note="Antisense strand to SEQ ID NO: 2451"
cuuagcacaaguaacuggu

SEQ ID NO: 2453 - RNA, 19 nt, Artificial Sequence
  source: /note="Description of Artificial Sequence: Synthetic oligonucleotide"
  source: /note="Sense strand starting at position 2029 of SEQ ID NO: 903"
aguuacuugugcuaagaca

SEQ ID NO: 2454 - RNA, 19 nt, Artificial Sequence
  source: /note="Description of Artificial Sequence: Synthetic oligonucleotide"
  source: /note="Antisense strand to SEQ ID NO: 2453"
ugucuuagcacaaguaacu

SEQ ID NO: 2455 - RNA, 19 nt, Artificial Sequence
  source: /note="Description of Artificial Sequence: Synthetic oligonucleotide"
  source: /note="Sense strand starting at position 2029 of SEQ ID NO: 978"
ccuaccuaauguugagaga

SEQ ID NO: 2456 - RNA, 19 nt, Artificial Sequence
  source: /note="Description of Artificial Sequence: Synthetic oligonucleotide"
  source: /note="Antisense strand to SEQ ID NO: 2455"
ucucucaacauuagguagg

SEQ ID NO: 2457 - RNA, 19 nt, Artificial Sequence
  source: /note="Description of Artificial Sequence: Synthetic oligonucleotide"
  source: /note="Sense strand starting at position 2029 of SEQ ID NO: 981"
accuaauguugagagacuu

SEQ ID NO: 2458 - RNA, 19 nt, Artificial Sequence
  source: /note="Description of Artificial Sequence: Synthetic oligonucleotide"
  source: /note="Antisense strand to SEQ ID NO: 2457"
aagucucucaacauuaggu

SEQ ID NO: 2459 - RNA, 19 nt, Artificial Sequence
  source: /note="Description of Artificial Sequence: Synthetic oligonucleotide"
  source: /note="Sense strand starting at position 2029 of SEQ ID NO: 1103"
ucauccagguugugauaaa

SEQ ID NO: 2460 - RNA, 19 nt, Artificial Sequence
  source: /note="Description of Artificial Sequence: Synthetic oligonucleotide"
  source: /note="Antisense strand to SEQ ID NO: 2459"
uuuaucacaaccuggauga

SEQ ID NO: 2461 - RNA, 19 nt, Artificial Sequence
  source: /note="Description of Artificial Sequence: Synthetic oligonucleotide"
  source: /note="Sense strand starting at position 2029 of SEQ ID NO: 1104"
cauccagguugugauaaac

SEQ ID NO: 2462 - RNA, 19 nt, Artificial Sequence
  source: /note="Description of Artificial Sequence: Synthetic oligonucleotide"
  source: /note="Antisense strand to SEQ ID NO: 2461"
guuuaucacaaccuggaug

SEQ ID NO: 2463 - RNA, 19 nt, Artificial Sequence
  source: /note="Description of Artificial Sequence: Synthetic oligonucleotide"
  source: /note="Sense strand starting at position 2029 of SEQ ID NO: 1323"
auugccuucuccuguuauu

SEQ ID NO: 2464 - RNA, 19 nt, Artificial Sequence
  source: /note="Description of Artificial Sequence: Synthetic oligonucleotide"
  source: /note="Antisense strand to SEQ ID NO: 2463"
aauaacaggagaaggcaau

SEQ ID NO: 2465 - RNA, 19 nt, Artificial Sequence
  source: /note="Description of Artificial Sequence: Synthetic oligonucleotide"
  source: /note="Sense strand starting at position 2029 of SEQ ID NO: 1326"
gccuucuccuguuauuaug

SEQ ID NO: 2466 - RNA, 19 nt, Artificial Sequence
  source: /note="Description of Artificial Sequence: Synthetic oligonucleotide"
  source: /note="Antisense strand to SEQ ID NO: 2465"
cauaauaacaggagaaggc

SEQ ID NO: 2467 - RNA, 19 nt, Artificial Sequence
  source: /note="Description of Artificial Sequence: Synthetic oligonucleotide"
  source: /note="Sense strand starting at position 2029 of SEQ ID NO: 1393"
cauuaugaguuggaaagua

SEQ ID NO: 2468 - RNA, 19 nt, Artificial Sequence
  source: /note="Description of Artificial Sequence: Synthetic oligonucleotide"
  source: /note="Antisense strand to SEQ ID NO: 2467"
uacuuuccaacucauaaug

SEQ ID NO: 2469 - RNA, 19 nt, Artificial Sequence
  source: /note="Description of Artificial Sequence: Synthetic oligonucleotide"
  source: /note="Sense strand starting at position 2029 of SEQ ID NO: 1401"
guuggaaaguaauguauuu

SEQ ID NO: 2470 - RNA, 19 nt, Artificial Sequence
  source: /note="Description of Artificial Sequence: Synthetic oligonucleotide"
  source: /note="Antisense strand to SEQ ID NO: 2469"
aaauacauuacuuuccaac

SEQ ID NO: 2471 - RNA, 19 nt, Artificial Sequence
  source: /note="Description of Artificial Sequence: Synthetic oligonucleotide"
  source: /note="Sense strand starting at position 2029 of SEQ ID NO: 1440"
aguuauaucuucuagucua

SEQ ID NO: 2472 - RNA, 19 nt, Artificial Sequence
  source: /note="Description of Artificial Sequence: Synthetic oligonucleotide"
  source: /note="Antisense strand to SEQ ID NO: 2471"
uagacuagaagauauaacu

SEQ ID NO: 2473 - RNA, 19 nt, Artificial Sequence
  source: /note="Description of Artificial Sequence: Synthetic oligonucleotide"
  source: /note="Sense strand starting at position 2029 of SEQ ID NO: 1584"
agaguuaacucugaccaua

SEQ ID NO: 2474 - RNA, 19 nt, Artificial Sequence
  source: /note="Description of Artificial Sequence: Synthetic oligonucleotide"
  source: /note="Antisense strand to SEQ ID NO: 2473"
uauggucagaguuaacucu

SEQ ID NO: 2475 - RNA, 19 nt, Artificial Sequence
  source: /note="Description of Artificial Sequence: Synthetic oligonucleotide"
  source: /note="Sense strand starting at position 2029 of SEQ ID NO: 1649"
ccagcacauuccugggagu

SEQ ID NO: 2476 - RNA, 19 nt, Artificial Sequence
  source: /note="Description of Artificial Sequence: Synthetic oligonucleotide"
  source: /note="Antisense strand to SEQ ID NO: 2475"
acucccaggaaugugcugg

SEQ ID NO: 2477 - RNA, 19 nt, Artificial Sequence
  source: /note="Description of Artificial Sequence: Synthetic oligonucleotide"
  source: /note="Sense strand starting at position 2029 of SEQ ID NO: 1660"
cugggagucugucauggga

SEQ ID NO: 2478 - RNA, 19 nt, Artificial Sequence
  source: /note="Description of Artificial Sequence: Synthetic oligonucleotide"
  source: /note="Antisense strand to SEQ ID NO: 2477"
ucccaugacagacucccag

SEQ ID NO: 2479 - RNA, 19 nt, Artificial Sequence
  source: /note="Description of Artificial Sequence: Synthetic oligonucleotide"
  source: /note="Sense strand starting at position 2029 of SEQ ID NO: 1715"
uugguauuauagcaucaua

SEQ ID NO: 2480 - RNA, 19 nt, Artificial Sequence
  source: /note="Description of Artificial Sequence: Synthetic oligonucleotide"
  source: /note="Antisense strand to SEQ ID NO: 2479"
uaugaugcuauaauaccaa

SEQ ID NO: 2481 - RNA, 19 nt, Artificial Sequence
  source: /note="Description of Artificial Sequence: Synthetic oligonucleotide"
  source: /note="Sense strand starting at position 2029 of SEQ ID NO: 1814"
auaggaccuugguaagagu

SEQ ID NO: 2482 - RNA, 19 nt, Artificial Sequence
  source: /note="Description of Artificial Sequence: Synthetic oligonucleotide"
  source: /note="Antisense strand to SEQ ID NO: 2481"
acucuuaccaagguccuau

SEQ ID NO: 2483 - RNA, 19 nt, Artificial Sequence
  source: /note="Description of Artificial Sequence: Synthetic oligonucleotide"
  source: /note="Sense strand starting at position 2029 of SEQ ID NO: 1817"
ggaccuugguaagaguuau

SEQ ID NO: 2484 - RNA, 19 nt, Artificial Sequence
  source: /note="Description of Artificial Sequence: Synthetic oligonucleotide"
  source: /note="Antisense strand to SEQ ID NO: 2483"
auaacucuuaccaaggucc

SEQ ID NO: 2485 - RNA, 19 nt, Artificial Sequence
  source: /note="Description of Artificial Sequence: Synthetic oligonucleotide"
  source: /note="Sense strand starting at position 2029 of SEQ ID NO: 1823"
ugguaagaguuaugauaag

SEQ ID NO: 2486 - RNA, 19 nt, Artificial Sequence
  source: /note="Description of Artificial Sequence: Synthetic oligonucleotide"
  source: /note="Antisense strand to SEQ ID NO: 2485"
cuuaucauaacucuuacca

SEQ ID NO: 2487 - RNA, 19 nt, Artificial Sequence
  source: /note="Description of Artificial Sequence: Synthetic oligonucleotide"
  source: /note="Sense strand starting at position 2029 of SEQ ID NO: 1895"
guagaagaaucugaccuuu

SEQ ID NO: 2488 - RNA, 19 nt, Artificial Sequence
  source: /note="Description of Artificial Sequence: Synthetic oligonucleotide"
  source: /note="Antisense strand to SEQ ID NO: 2487"
aaaggucagauucuucuac

SEQ ID NO: 2489 - RNA, 19 nt, Artificial Sequence
  source: /note="Description of Artificial Sequence: Synthetic oligonucleotide"
  source: /note="Sense strand starting at position 2029 of SEQ ID NO: 1965"
cacugauccuguugcauag

SEQ ID NO: 2490 - RNA, 19 nt, Artificial Sequence
  source: /note="Description of Artificial Sequence: Synthetic oligonucleotide"
  source: /note="Antisense strand to SEQ ID NO: 2489"
cuaugcaacaggaucagug

SEQ ID NO: 2491 - RNA, 19 nt, Artificial Sequence
  source: /note="Description of Artificial Sequence: Synthetic oligonucleotide"
  source: /note="Sense strand starting at position 2029 of SEQ ID NO: 2039"
cuuacauucuguugacaga

SEQ ID NO: 2492 - RNA, 19 nt, Artificial Sequence
  source: /note="Description of Artificial Sequence: Synthetic oligonucleotide"
  source: /note="Antisense strand to SEQ ID NO: 2491"
ucugucaacagaauguaag

SEQ ID NO: 2493 - RNA, 19 nt, Artificial Sequence
  source: /note="Description of Artificial Sequence: Synthetic oligonucleotide"
  source: /note="Sense strand starting at position 2029 of SEQ ID NO: 2177"
auaugcaacugacaguuua

SEQ ID NO: 2494 - RNA, 19 nt, Artificial Sequence
  source: /note="Description of Artificial Sequence: Synthetic oligonucleotide"
  source: /note="Antisense strand to SEQ ID NO: 2493"
uaaacugucaguugcauau

SEQ ID NO: 2495 - RNA, 19 nt, Artificial Sequence
  source: /note="Description of Artificial Sequence: Synthetic oligonucleotide"
  source: /note="Sense strand starting at position 2029 of SEQ ID NO: 2274"
cuuccuuguucccagcaga

SEQ ID NO: 2496 - RNA, 19 nt, Artificial Sequence
  source: /note="Description of Artificial Sequence: Synthetic oligonucleotide"
  source: /note="Antisense strand to SEQ ID NO: 2495"
ucugcugggaacaaggaag

SEQ ID NO: 2497 - RNA, 19 nt, Artificial Sequence
  source: /note="Description of Artificial Sequence: Synthetic oligonucleotide"
  source: /note="Sense strand starting at position 2029 of SEQ ID NO: 2369"
ggcuuuguauauuaucuga

SEQ ID NO: 2498 - RNA, 19 nt, Artificial Sequence
  source: /note="Description of Artificial Sequence: Synthetic oligonucleotide"
  source: /note="Antisense strand to SEQ ID NO: 2497"
ucagauaauauacaaagcc

SEQ ID NO: 2499 - RNA, 19 nt, Artificial Sequence
  source: /note="Description of Artificial Sequence: Synthetic oligonucleotide"
  source: /note="Sense strand starting at position 2029 of SEQ ID NO: 2384"
cugacuugcucuuagagau

SEQ ID NO: 2500 - RNA, 19 nt, Artificial Sequence
  source: /note="Description of Artificial Sequence: Synthetic oligonucleotide"
  source: /note="Antisense strand to SEQ ID NO: 2499"
aucucuaagagcaagucag

SEQ ID NO: 2501 - RNA, 19 nt, Artificial Sequence
  source: /note="Description of Artificial Sequence: Synthetic oligonucleotide"
  source: /note="Sense strand starting at position 2029 of SEQ ID NO: 2595"
gccacagccucuuaagaug

SEQ ID NO: 2502 - RNA, 19 nt, Artificial Sequence
  source: /note="Description of Artificial Sequence: Synthetic oligonucleotide"
  source: /note="Antisense strand to SEQ ID NO: 2501"
caucuuaagaggcuguggc

SEQ ID NO: 2503 - RNA, 19 nt, Artificial Sequence
  source: /note="Description of Artificial Sequence: Synthetic oligonucleotide"
  source: /note="Sense strand starting at position 2029 of SEQ ID NO: 2610"
gaugcagaauucugaaugu

SEQ ID NO: 2504 - RNA, 19 nt, Artificial Sequence
  source: /note="Description of Artificial Sequence: Synthetic oligonucleotide"
  source: /note="Antisense strand to SEQ ID NO: 2503"
acauucagaauucugcauc

SEQ ID NO: 2505 - RNA, 19 nt, Artificial Sequence
  source: /note="Description of Artificial Sequence: Synthetic oligonucleotide"
  source: /note="Sense strand starting at position 2029 of SEQ ID NO: 2652"
augaaugucuauugucacu

SEQ ID NO: 2506 - RNA, 19 nt, Artificial Sequence
  source: /note="Description of Artificial Sequence: Synthetic oligonucleotide"
  source: /note="Antisense strand to SEQ ID NO: 2505"
agugacaauagacauucau

SEQ ID NO: 2507 - RNA, 19 nt, Artificial Sequence
  source: /note="Description of Artificial Sequence: Synthetic oligonucleotide"
  source: /note="Sense strand starting at position 2029 of SEQ ID NO: 2704"
uaaagagaguuguguccca

SEQ ID NO: 2508 - RNA, 19 nt, Artificial Sequence
  source: /note="Description of Artificial Sequence: Synthetic oligonucleotide"
  source: /note="Antisense strand to SEQ ID NO: 2507"
ugggacacaacucucuuua

SEQ ID NO: 2509 - RNA, 19 nt, Artificial Sequence
  source: /note="Description of Artificial Sequence: Synthetic oligonucleotide"
  source: /note="Sense strand starting at position 2029 of SEQ ID NO: 2709"
agaguugugucccauucuc

SEQ ID NO: 2510 - RNA, 19 nt, Artificial Sequence
  source: /note="Description of Artificial Sequence: Synthetic oligonucleotide"
  source: /note="Antisense strand to SEQ ID NO: 2509"
gagaaugggacacaacucu

SEQ ID NO: 2511 - RNA, 19 nt, Artificial Sequence
  source: /note="Description of Artificial Sequence: Synthetic oligonucleotide"
  source: /note="Sense strand starting at position 2029 of SEQ ID NO: 2808"
aguaguaucucugaguagu

SEQ ID NO: 2512 - RNA, 19 nt, Artificial Sequence
  source: /note="Description of Artificial Sequence: Synthetic oligonucleotide"
  source: /note="Antisense strand to SEQ ID NO: 2511"
acuacucagagauacuacu

SEQ ID NO: 2513 - RNA, 19 nt, Artificial Sequence
  source: /note="Description of Artificial Sequence: Synthetic oligonucleotide"
  source: /note="Sense strand starting at position 2029 of SEQ ID NO: 2866"
gaaaguaguuuauauggua

SEQ ID NO: 2514 - RNA, 19 nt, Artificial Sequence
  source: /note="Description of Artificial Sequence: Synthetic oligonucleotide"
  source: /note="Antisense strand to SEQ ID NO: 2513"
uaccauauaaacuacuuuc

SEQ ID NO: 2515 - RNA, 19 nt, Artificial Sequence
  source: /note="Description of Artificial Sequence: Synthetic oligonucleotide"
  source: /note="Sense strand starting at position 2029 of SEQ ID NO: 2869"
aguaguuuauaugguagaa

SEQ ID NO: 2516 - RNA, 19 nt, Artificial Sequence
  source: /note="Description of Artificial Sequence: Synthetic oligonucleotide"
  source: /note="Antisense strand to SEQ ID NO: 2515"
uucuaccauauaaacuacu

SEQ ID NO: 2517 - RNA, 19 nt, Artificial Sequence
  source: /note="Description of Artificial Sequence: Synthetic oligonucleotide"
  source: /note="Sense strand starting at position 2029 of SEQ ID NO: 2885"
gaagguuaguauugggauu

SEQ ID NO: 2518 - RNA, 19 nt, Artificial Sequence
  source: /note="Description of Artificial Sequence: Synthetic oligonucleotide"
  source: /note="Antisense strand to SEQ ID NO: 2517"
aaucccaauacuaaccuuc

SEQ ID NO: 2519 - RNA, 19 nt, Artificial Sequence
  source: /note="Description of Artificial Sequence: Synthetic oligonucleotide"
  source: /note="Sense strand starting at position 2029 of SEQ ID NO: 2887"
agguuaguauugggauucu

SEQ ID NO: 2520 - RNA, 19 nt, Artificial Sequence
  source: /note="Description of Artificial Sequence: Synthetic oligonucleotide"
  source: /note="Antisense strand to SEQ ID NO: 2519"
agaaucccaauacuaaccu

SEQ ID NO: 2521 - RNA, 19 nt, Artificial Sequence
  source: /note="Description of Artificial Sequence: Synthetic oligonucleotide"
  source: /note="Sense strand starting at position 2029 of SEQ ID NO: 3064"
agaucuaaguuccagauaa

SEQ ID NO: 2522 - RNA, 19 nt, Artificial Sequence
  source: /note="Description of Artificial Sequence: Synthetic oligonucleotide"
  source: /note="Antisense strand to SEQ ID NO: 2521"
uuaucuggaacuuagaucu

SEQ ID NO: 2523 - RNA, 19 nt, Artificial Sequence
  source: /note="Description of Artificial Sequence: Synthetic oligonucleotide"
  source: /note="Sense strand starting at position 2029 of SEQ ID NO: 3102"
cuuuacuucuucuguugua

SEQ ID NO: 2524 - RNA, 19 nt, Artificial Sequence
  source: /note="Description of Artificial Sequence: Synthetic oligonucleotide"
  source: /note="Antisense strand to SEQ ID NO: 2523"
uacaacagaagaaguaaag

SEQ ID NO: 2525 - RNA, 19 nt, Artificial Sequence
  source: /note="Description of Artificial Sequence: Synthetic oligonucleotide"
  source: /note="Sense strand starting at position 2029 of SEQ ID NO: 3275"
auccuacauugauagcaga

SEQ ID NO: 2526 - RNA, 19 nt, Artificial Sequence
  source: /note="Description of Artificial Sequence: Synthetic oligonucleotide"
  source: /note="Antisense strand to SEQ ID NO: 2525"
ucugcuaucaauguaggau

SEQ ID NO: 2527 - RNA, 19 nt, Artificial Sequence
  source: /note="Description of Artificial Sequence: Synthetic oligonucleotide"
  source: /note="Sense strand starting at position 2029 of SEQ ID NO: 3315"
uccuuaagguuauguauac

SEQ ID NO: 2528 - RNA, 19 nt, Artificial Sequence
  source: /note="Description of Artificial Sequence: Synthetic oligonucleotide"
  source: /note="Antisense strand to SEQ ID NO: 2527"
guauacauaaccuuaagga

SEQ ID NO: 2529 - RNA, 19 nt, Artificial Sequence
  source: /note="Description of Artificial Sequence: Synthetic oligonucleotide"
  source: /note="Sense strand starting at position 2029 of SEQ ID NO: 3322"
gguuauguauaccaugaag

SEQ ID NO: 2530 - RNA, 19 nt, Artificial Sequence
  source: /note="Description of Artificial Sequence: Synthetic oligonucleotide"
  source: /note="Antisense strand to SEQ ID NO: 2529"
cuucaugguauacauaacc

SEQ ID NO: 2531 - RNA, 19 nt, Artificial Sequence
  source: /note="Description of Artificial Sequence: Synthetic oligonucleotide"
  source: /note="Sense strand starting at position 2029 of SEQ ID NO: 3521"
uuagcacuuugggaaaugu

SEQ ID NO: 2532 - RNA, 19 nt, Artificial Sequence
  source: /note="Description of Artificial Sequence: Synthetic oligonucleotide"
  source: /note="Antisense strand to SEQ ID NO: 2531"
acauuucccaaagugcuaa

SEQ ID NO: 2533 - RNA, 19 nt, Artificial Sequence
  source: /note="Description of Artificial Sequence: Synthetic oligonucleotide"
  source: /note="Sense strand starting at position 2029 of SEQ ID NO: 3621"
acuaaauauugacggcaau

SEQ ID NO: 2534 - RNA, 19 nt, Artificial Sequence
  source: /note="Description of Artificial Sequence: Synthetic oligonucleotide"
  source: /note="Antisense strand to SEQ ID NO: 2533"
auugccgucaauauuuagu

SEQ ID NO: 2535 - RNA, 19 nt, Artificial Sequence
  source: /note="Description of Artificial Sequence: Synthetic oligonucleotide"
  source: /note="Sense strand starting at position 2029 of SEQ ID NO: 3634"
ggcaauuccugccaagucu

SEQ ID NO: 2536 - RNA, 19 nt, Artificial Sequence
  source: /note="Description of Artificial Sequence: Synthetic oligonucleotide"
  source: /note="Antisense strand to SEQ ID NO: 2535"
agacuuggcaggaauugcc

SEQ ID NO: 2537 - RNA, 19 nt, Artificial Sequence
  source: /note="Description of Artificial Sequence: Synthetic oligonucleotide"
  source: /note="Sense strand starting at position 2029 of SEQ ID NO: 3727"
agauaagucuucugucagu

SEQ ID NO: 2538 - RNA, 19 nt, Artificial Sequence
  source: /note="Description of Artificial Sequence: Synthetic oligonucleotide"
  source: /note="Antisense strand to SEQ ID NO: 2537"
acugacagaagacuuaucu

SEQ ID NO: 2539 - RNA, 19 nt, Artificial Sequence
  source: /note="Description of Artificial Sequence: Synthetic oligonucleotide"
  source: /note="Sense strand starting at position 2029 of SEQ ID NO: 3757"
aggucaugauggugauaca

SEQ ID NO: 2540 - RNA, 19 nt, Artificial Sequence
  source: /note="Description of Artificial Sequence: Synthetic oligonucleotide"
  source: /note="Antisense strand to SEQ ID NO: 2539"
uguaucaccaucaugaccu

SEQ ID NO: 2541 - RNA, 19 nt, Artificial Sequence
  source: /note="Description of Artificial Sequence: Synthetic oligonucleotide"
  source: /note="Sense strand starting at position 2029 of SEQ ID NO: 3827"
guacaaauguaccaccuua

SEQ ID NO: 2542 - RNA, 19 nt, Artificial Sequence
  source: /note="Description of Artificial Sequence: Synthetic oligonucleotide"
  source: /note="Antisense strand to SEQ ID NO: 2541"
uaaggugguacauuuguac

SEQ ID NO: 2543 - RNA, 19 nt, Artificial Sequence
  source: /note="Description of Artificial Sequence: Synthetic oligonucleotide"
  source: /note="Sense strand starting at position 2029 of SEQ ID NO: 3904"
cacugagacucggauguuu

SEQ ID NO: 2544 - RNA, 19 nt, Artificial Sequence
  source: /note="Description of Artificial Sequence: Synthetic oligonucleotide"
  source: /note="Antisense strand to SEQ ID NO: 2543"
aaacauccgagucucagug

SEQ ID NO: 2545 - RNA, 19 nt, Artificial Sequence
  source: /note="Description of Artificial Sequence: Synthetic oligonucleotide"
  source: /note="Sense strand starting at position 2029 of SEQ ID NO: 3941"
ccauauagcugauaagugu

SEQ ID NO: 2546 - RNA, 19 nt, Artificial Sequence
  source: /note="Description of Artificial Sequence: Synthetic oligonucleotide"
  source: /note="Antisense strand to SEQ ID NO: 2545"
acacuuaucagcuauaugg

SEQ ID NO: 2547 - RNA, 19 nt, Artificial Sequence
  source: /note="Description of Artificial Sequence: Synthetic oligonucleotide"
  source: /note="Sense strand starting at position 2029 of SEQ ID NO: 3948"
gcugauaaguguuagaacu

SEQ ID NO: 2548 - RNA, 19 nt, Artificial Sequence
  source: /note="Description of Artificial Sequence: Synthetic oligonucleotide"
  source: /note="Antisense strand to SEQ ID NO: 2547"
aguucuaacacuuaucagc

SEQ ID NO: 2549 - RNA, 19 nt, Artificial Sequence
  source: /note="Description of Artificial Sequence: Synthetic oligonucleotide"
  source: /note="Sense strand starting at position 2029 of SEQ ID NO: 3982"
uucucuugauucuagaaga

SEQ ID NO: 2550 - RNA, 19 nt, Artificial Sequence
  source: /note="Description of Artificial Sequence: Synthetic oligonucleotide"
  source: /note="Antisense strand to SEQ ID NO: 2549"
ucuucuagaaucaagagaa

SEQ ID NO: 2551 - RNA, 19 nt, Artificial Sequence
  source: /note="Description of Artificial Sequence: Synthetic oligonucleotide"
  source: /note="Sense strand starting at position 2028 of SEQ ID NO: 160"
agacuauccuaaggaauuc

SEQ ID NO: 2552 - RNA, 19 nt, Artificial Sequence
  source: /note="Description of Artificial Sequence: Synthetic oligonucleotide"
  source: /note="Antisense strand to SEQ ID NO: 2551"
gaauuccuuaggauagucu

SEQ ID NO: 2553 - RNA, 19 nt, Artificial Sequence
  source: /note="Description of Artificial Sequence: Synthetic oligonucleotide"
  source: /note="Sense strand starting at position 2028 of SEQ ID NO: 233"
gccaccauucugugugacu

SEQ ID NO: 2554 - RNA, 19 nt, Artificial Sequence
  source: /note="Description of Artificial Sequence: Synthetic oligonucleotide"
  source: /note="Antisense strand to SEQ ID NO: 2553"
agucacacagaaugguggc

SEQ ID NO: 2555 - RNA, 19 nt, Artificial Sequence
  source: /note="Description of Artificial Sequence: Synthetic oligonucleotide"
  source: /note="Sense strand starting at position 2028 of SEQ ID NO: 811"
aguuacuuguucuggcuau

SEQ ID NO: 2556 - RNA, 19 nt, Artificial Sequence
  source: /note="Description of Artificial Sequence: Synthetic oligonucleotide"
  source: /note="Antisense strand to SEQ ID NO: 2555"
auagccagaacaaguaacu

SEQ ID NO: 2557 - RNA, 19 nt, Artificial Sequence
  source: /note="Description of Artificial Sequence: Synthetic oligonucleotide"
  source: /note="Sense strand starting at position 2028 of SEQ ID NO: 812"
guuacuuguucuggcuauu

SEQ ID NO: 2558 - RNA, 19 nt, Artificial Sequence
  source: /note="Description of Artificial Sequence: Synthetic oligonucleotide"
  source: /note="Antisense strand to SEQ ID NO: 2557"
aauagccagaacaaguaac

SEQ ID NO: 2559 - RNA, 19 nt, Artificial Sequence
  source: /note="Description of Artificial Sequence: Synthetic oligonucleotide"
  source: /note="Sense strand starting at position 2028 of SEQ ID NO: 953"
gauauacgaugacauagua

SEQ ID NO: 2560 - RNA, 19 nt, Artificial Sequence
  source: /note="Description of Artificial Sequence: Synthetic oligonucleotide"
  source: /note="Antisense strand to SEQ ID NO: 2559"
uacuaugucaucguauauc

SEQ ID NO: 2561 - RNA, 19 nt, Artificial Sequence
  source: /note="Description of Artificial Sequence: Synthetic oligonucleotide"
  source: /note="Sense strand starting at position 2028 of SEQ ID NO: 1079"
ccuaguguuucuuaaugug

SEQ ID NO: 2562 - RNA, 19 nt, Artificial Sequence
  source: /note="Description of Artificial Sequence: Synthetic oligonucleotide"
  source: /note="Antisense strand to SEQ ID NO: 2561"
cacauuaagaaacacuagg

SEQ ID NO: 2563 - RNA, 19 nt, Artificial Sequence
  source: /note="Description of Artificial Sequence: Synthetic oligonucleotide"
  source: /note="Sense strand starting at position 2028 of SEQ ID NO: 1082"
aguguuucuuaaugugaca

SEQ ID NO: 2564 - RNA, 19 nt, Artificial Sequence
  source: /note="Description of Artificial Sequence: Synthetic oligonucleotide"
  source: /note="Antisense strand to SEQ ID NO: 2563"
ugucacauuaagaaacacu

SEQ ID NO: 2565 - RNA, 19 nt, Artificial Sequence
  source: /note="Description of Artificial Sequence: Synthetic oligonucleotide"
  source: /note="Sense strand starting at position 2028 of SEQ ID NO: 1085"
guuucuuaaugugacacaa

SEQ ID NO: 2566 - RNA, 19 nt, Artificial Sequence
  source: /note="Description of Artificial Sequence: Synthetic oligonucleotide"
  source: /note="Antisense strand to SEQ ID NO: 2565"
uugugucacauuaagaaac

SEQ ID NO: 2567 - RNA, 19 nt, Artificial Sequence
  source: /note="Description of Artificial Sequence: Synthetic oligonucleotide"
  source: /note="Sense strand starting at position 2028 of SEQ ID NO: 1087"
uucuuaaugugacacaaag

SEQ ID NO: 2568 - RNA, 19 nt, Artificial Sequence
  source: /note="Description of Artificial Sequence: Synthetic oligonucleotide"
  source: /note="Antisense strand to SEQ ID NO: 2567"
cuuugugucacauuaagaa

SEQ ID NO: 2569 - RNA, 19 nt, Artificial Sequence
  source: /note="Description of Artificial Sequence: Synthetic oligonucleotide"
  source: /note="Sense strand starting at position 2028 of SEQ ID NO: 1291"
aaaguuaauugccgucuua

SEQ ID NO: 2570 - RNA, 19 nt, Artificial Sequence
  source: /note="Description of Artificial Sequence: Synthetic oligonucleotide"
  source: /note="Antisense strand to SEQ ID NO: 2569"
uaagacggcaauuaacuuu

SEQ ID NO: 2571 - RNA, 19 nt, Artificial Sequence
  source: /note="Description of Artificial Sequence: Synthetic oligonucleotide"
  source: /note="Sense strand starting at position 2028 of SEQ ID NO: 1400"
auugccuguuacuguuaaa

SEQ ID NO: 2572 - RNA, 19 nt, Artificial Sequence
  source: /note="Description of Artificial Sequence: Synthetic oligonucleotide"
  source: /note="Antisense strand to SEQ ID NO: 2571"
uuuaacaguaacaggcaau

SEQ ID NO: 2573 - RNA, 19 nt, Artificial Sequence
  source: /note="Description of Artificial Sequence: Synthetic oligonucleotide"
  source: /note="Sense strand starting at position 2028 of SEQ ID NO: 1403"
gccuguuacuguuaaacuc

SEQ ID NO: 2574 - RNA, 19 nt, Artificial Sequence
  source: /note="Description of Artificial Sequence: Synthetic oligonucleotide"
  source: /note="Antisense strand to SEQ ID NO: 2573"
gaguuuaacaguaacaggc

SEQ ID NO: 2575 - RNA, 19 nt, Artificial Sequence
  source: /note="Description of Artificial Sequence: Synthetic oligonucleotide"
  source: /note="Sense strand starting at position 2028 of SEQ ID NO: 1423"
auuguucccugauggagua

SEQ ID NO: 2576 - RNA, 19 nt, Artificial Sequence
  source: /note="Description of Artificial Sequence: Synthetic oligonucleotide"
  source: /note="Antisense strand to SEQ ID NO: 2575"
uacuccaucagggaacaau

SEQ ID NO: 2577 - RNA, 19 nt, Artificial Sequence
  source: /note="Description of Artificial Sequence: Synthetic oligonucleotide"
  source: /note="Sense strand starting at position 2028 of SEQ ID NO: 1629"
gguuuaacuugagagcaaa

SEQ ID NO: 2578 - RNA, 19 nt, Artificial Sequence
  source: /note="Description of Artificial Sequence: Synthetic oligonucleotide"
  source: /note="Antisense strand to SEQ ID NO: 2577"
uuugcucucaaguuaaacc

SEQ ID NO: 2579 - RNA, 19 nt, Artificial Sequence
  source: /note="Description of Artificial Sequence: Synthetic oligonucleotide"
  source: /note="Sense strand starting at position 2028 of SEQ ID NO: 1671"
ugcuuugauucccagcuuu

SEQ ID NO: 2580 - RNA, 19 nt, Artificial Sequence
  source: /note="Description of Artificial Sequence: Synthetic oligonucleotide"
  source: /note="Antisense strand to SEQ ID NO: 2579"
aaagcugggaaucaaagca

SEQ ID NO: 2581 - RNA, 19 nt, Artificial Sequence
  source: /note="Description of Artificial Sequence: Synthetic oligonucleotide"
  source: /note="Sense strand starting at position 2028 of SEQ ID NO: 1783"
gcuccugcaucagaauaga

SEQ ID NO: 2582 - RNA, 19 nt, Artificial Sequence
  source: /note="Description of Artificial Sequence: Synthetic oligonucleotide"
  source: /note="Antisense strand to SEQ ID NO: 2581"
ucuauucugaugcaggagc

SEQ ID NO: 2583 - RNA, 19 nt, Artificial Sequence
  source: /note="Description of Artificial Sequence: Synthetic oligonucleotide"
  source: /note="Sense strand starting at position 2028 of SEQ ID NO: 1850"
acagaugucuuccagcuuu

SEQ ID NO: 2584 - RNA, 19 nt, Artificial Sequence
  source: /note="Description of Artificial Sequence: Synthetic oligonucleotide"
  source: /note="Antisense strand to SEQ ID NO: 2583"
aaagcuggaagacaucugu

SEQ ID NO: 2585 - RNA, 19 nt, Artificial Sequence
  source: /note="Description of Artificial Sequence: Synthetic oligonucleotide"
  source: /note="Sense strand starting at position 2028 of SEQ ID NO: 1963"
agcaaugccuccgcacaaa

SEQ ID NO: 2586 - RNA, 19 nt, Artificial Sequence
  source: /note="Description of Artificial Sequence: Synthetic oligonucleotide"
  source: /note="Antisense strand to SEQ ID NO: 2585"
uuugugcggaggcauugcu

SEQ ID NO: 2587 - RNA, 19 nt, Artificial Sequence
  source: /note="Description of Artificial Sequence: Synthetic oligonucleotide"
  source: /note="Sense strand starting at position 2028 of SEQ ID NO: 1980"
aagcuuugccauugcuagu

SEQ ID NO: 2588 - RNA, 19 nt, Artificial Sequence
  source: /note="Description of Artificial Sequence: Synthetic oligonucleotide"
  source: /note="Antisense strand to SEQ ID NO: 2587"
acuagcaauggcaaagcuu

SEQ ID NO: 2589 - RNA, 19 nt, Artificial Sequence
  source: /note="Description of Artificial Sequence: Synthetic oligonucleotide"
  source: /note="Sense strand starting at position 2028 of SEQ ID NO: 1986"
ugccauugcuagugugaag

SEQ ID NO: 2590 - RNA, 19 nt, Artificial Sequence
  source: /note="Description of Artificial Sequence: Synthetic oligonucleotide"
  source: /note="Antisense strand to SEQ ID NO: 2589"
cuucacacuagcaauggca

SEQ ID NO: 2591 - RNA, 19 nt, Artificial Sequence
  source: /note="Description of Artificial Sequence: Synthetic oligonucleotide"
  source: /note="Sense strand starting at position 2028 of SEQ ID NO: 1989"
cauugcuagugugaagaga

SEQ ID NO: 2592 - RNA, 19 nt, Artificial Sequence
  source: /note="Description of Artificial Sequence: Synthetic oligonucleotide"
  source: /note="Antisense strand to SEQ ID NO: 2591"
ucucuucacacuagcaaug

SEQ ID NO: 2593 - RNA, 19 nt, Artificial Sequence
  source: /note="Description of Artificial Sequence: Synthetic oligonucleotide"
  source: /note="Sense strand starting at position 2028 of SEQ ID NO: 2039"
gccaacuuuguguguagca

SEQ ID NO: 2594 - RNA, 19 nt, Artificial Sequence
  source: /note="Description of Artificial Sequence: Synthetic oligonucleotide"
  source: /note="Antisense strand to SEQ ID NO: 2593"
ugcuacacacaaaguuggc

SEQ ID NO: 2595 - RNA, 19 nt, Artificial Sequence
  source: /note="Description of Artificial Sequence: Synthetic oligonucleotide"
  source: /note="Sense strand starting at position 2028 of SEQ ID NO: 2040"
ccaacuuuguguguagcaa

SEQ ID NO: 2596 - RNA, 19 nt, Artificial Sequence
  source: /note="Description of Artificial Sequence: Synthetic oligonucleotide"
  source: /note="Antisense strand to SEQ ID NO: 2595"
uugcuacacacaaaguugg

SEQ ID NO: 2597 - RNA, 19 nt, Artificial Sequence
  source: /note="Description of Artificial Sequence: Synthetic oligonucleotide"
  source: /note="Sense strand starting at position 2028 of SEQ ID NO: 2080"
cugaaacucugcuggauca

SEQ ID NO: 2598 - RNA, 19 nt, Artificial Sequence
  source: /note="Description of Artificial Sequence: Synthetic oligonucleotide"
  source: /note="Antisense strand to SEQ ID NO: 2597"
ugauccagcagaguuucag

SEQ ID NO: 2599 - RNA, 19 nt, Artificial Sequence
  source: /note="Description of Artificial Sequence: Synthetic oligonucleotide"
  source: /note="Sense strand starting at position 2028 of SEQ ID NO: 2132"
ugcauuaccugauggagau

SEQ ID NO: 2600 - RNA, 19 nt, Artificial Sequence
  source: /note="Description of Artificial Sequence: Synthetic oligonucleotide"
  source: /note="Antisense strand to SEQ ID NO: 2599"
aucuccaucagguaaugca

SEQ ID NO: 2601 - RNA, 19 nt, Artificial Sequence
  source: /note="Description of Artificial Sequence: Synthetic oligonucleotide"
  source: /note="Sense strand starting at position 2028 of SEQ ID NO: 2246"
cugauacuuuaaggaagau

SEQ ID NO: 2602 - RNA, 19 nt, Artificial Sequence
  source: /note="Description of Artificial Sequence: Synthetic oligonucleotide"
  source: /note="Antisense strand to SEQ ID NO: 2601"
aucuuccuuaaaguaucag

SEQ ID NO: 2603 - RNA, 19 nt, Artificial Sequence
  source: /note="Description of Artificial Sequence: Synthetic oligonucleotide"
  source: /note="Sense strand starting at position 2028 of SEQ ID NO: 2262"
gaucauuuauugugagcuc

SEQ ID NO: 2604 - RNA, 19 nt, Artificial Sequence
  source: /note="Description of Artificial Sequence: Synthetic oligonucleotide"
  source: /note="Antisense strand to SEQ ID NO: 2603"
gagcucacaauaaaugauc

SEQ ID NO: 2605 - RNA, 19 nt, Artificial Sequence
  source: /note="Description of Artificial Sequence: Synthetic oligonucleotide"
  source: /note="Sense strand starting at position 2028 of SEQ ID NO: 2335"
gucagcacuugauaaauau

SEQ ID NO: 2606 - RNA, 19 nt, Artificial Sequence
  source: /note="Description of Artificial Sequence: Synthetic oligonucleotide"
  source: /note="Antisense strand to SEQ ID NO: 2605"
auauuuaucaagugcugac

SEQ ID NO: 2607 - RNA, 19 nt, Artificial Sequence
  source: /note="Description of Artificial Sequence: Synthetic oligonucleotide"
  source: /note="Sense strand starting at position 2028 of SEQ ID NO: 2549"
cuguauagcugaugauaaa

SEQ ID NO: 2608 - RNA, 19 nt, Artificial Sequence
  source: /note="Description of Artificial Sequence: Synthetic oligonucleotide"
  source: /note="Antisense strand to SEQ ID NO: 2607"
uuuaucaucagcuauacag

SEQ ID NO: 2609 - RNA, 19 nt, Artificial Sequence
  source: /note="Description of Artificial Sequence: Synthetic oligonucleotide"
  source: /note="Sense strand starting at position 2028 of SEQ ID NO: 3199"
gcacgcaauuauuaaccuu

SEQ ID NO: 2610 - RNA, 19 nt, Artificial Sequence
  source: /note="Description of Artificial Sequence: Synthetic oligonucleotide"
  source: /note="Antisense strand to SEQ ID NO: 2609"
aagguuaauaauugcgugc

SEQ ID NO: 2611 - RNA, 19 nt, Artificial Sequence
  source: /note="Description of Artificial Sequence: Synthetic oligonucleotide"
  source: /note="Sense strand starting at position 2028 of SEQ ID NO: 3207"
uuauuaaccuucuggagcu

SEQ ID NO: 2612 - RNA, 19 nt, Artificial Sequence
  source: /note="Description of Artificial Sequence: Synthetic oligonucleotide"
  source: /note="Antisense strand to SEQ ID NO: 2611"
agcuccagaagguuaauaa

SEQ ID NO: 2613 - RNA, 19 nt, Artificial Sequence
  source: /note="Description of Artificial Sequence: Synthetic oligonucleotide"
  source: /note="Sense strand starting at position 2028 of SEQ ID NO: 3330"
gcauauucuuuacauguua

SEQ ID NO: 2614 - RNA, 19 nt, Artificial Sequence
  source: /note="Description of Artificial Sequence: Synthetic oligonucleotide"
  source: /note="Antisense strand to SEQ ID NO: 2613"
uaacauguaaagaauaugc

SEQ ID NO: 2615 - RNA, 19 nt, Artificial Sequence
  source: /note="Description of Artificial Sequence: Synthetic oligonucleotide"
  source: /note="Sense strand starting at position 2028 of SEQ ID NO: 3391"
gagguuaauuccugaagcu

SEQ ID NO: 2616 - RNA, 19 nt, Artificial Sequence
  source: /note="Description of Artificial Sequence: Synthetic oligonucleotide"
  source: /note="Antisense strand to SEQ ID NO: 2615"
agcuucaggaauuaaccuc

SEQ ID NO: 2617 - RNA, 19 nt, Artificial Sequence
  source: /note="Description of Artificial Sequence: Synthetic oligonucleotide"
  source: /note="Sense strand starting at position 2028 of SEQ ID NO: 3550"
augacauucugauguggca

SEQ ID NO: 2618 - RNA, 19 nt, Artificial Sequence
  source: /note="Description of Artificial Sequence: Synthetic oligonucleotide"
  source: /note="Antisense strand to SEQ ID NO: 2617"
ugccacaucagaaugucau

SEQ ID NO: 2619 - RNA, 19 nt, Artificial Sequence
  source: /note="Description of Artificial Sequence: Synthetic oligonucleotide"
  source: /note="Sense strand starting at position 2028 of SEQ ID NO: 3570"
gcuuuauugugcuguuuau

SEQ ID NO: 2620 - RNA, 19 nt, Artificial Sequence
  source: /note="Description of Artificial Sequence: Synthetic oligonucleotide"
  source: /note="Antisense strand to SEQ ID NO: 2619"
auaaacagcacaauaaagc

SEQ ID NO: 2621 - RNA, 19 nt, Artificial Sequence
  source: /note="Description of Artificial Sequence: Synthetic oligonucleotide"
  source: /note="Sense strand starting at position 2028 of SEQ ID NO: 3576"
uugugcuguuuaugacaau

SEQ ID NO: 2622 - RNA, 19 nt, Artificial Sequence
  source: /note="Description of Artificial Sequence: Synthetic oligonucleotide"
  source: /note="Antisense strand to SEQ ID NO: 2621"
auugucauaaacagcacaa

SEQ ID NO: 2623 - RNA, 19 nt, Artificial Sequence
  source: /note="Description of Artificial Sequence: Synthetic oligonucleotide"
  source: /note="Sense strand starting at position 2028 of SEQ ID NO: 3577"
ugugcuguuuaugacaaua

SEQ ID NO: 2624 - RNA, 19 nt, Artificial Sequence
  source: /note="Description of Artificial Sequence: Synthetic oligonucleotide"
  source: /note="Antisense strand to SEQ ID NO: 2623"
uauugucauaaacagcaca

SEQ ID NO: 2625 - RNA, 19 nt, Artificial Sequence
  source: /note="Description of Artificial Sequence: Synthetic oligonucleotide"
  source: /note="Sense strand starting at position 2028 of SEQ ID NO: 3579"
ugcuguuuaugacaauauc

SEQ ID NO: 2626 - RNA, 19 nt, Artificial Sequence
  source: /note="Description of Artificial Sequence: Synthetic oligonucleotide"
  source: /note="Antisense strand to SEQ ID NO: 2625"
gauauugucauaaacagca

SEQ ID NO: 2627 - RNA, 19 nt, Artificial Sequence
  source: /note="Description of Artificial Sequence: Synthetic oligonucleotide"
  source: /note="Sense strand starting at position 2028 of SEQ ID NO: 3598"
ugcagauuaugaugugcuu

SEQ ID NO: 2628 - RNA, 19 nt, Artificial Sequence
  source: /note="Description of Artificial Sequence: Synthetic oligonucleotide"
  source: /note="Antisense strand to SEQ ID NO: 2627"
aagcacaucauaaucugca

SEQ ID NO: 2629 - RNA, 19 nt, Artificial Sequence
  source: /note="Description of Artificial Sequence: Synthetic oligonucleotide"
  source: /note="Sense strand starting at position 2028 of SEQ ID NO: 3611"
gugcuuguuuaauaaacag

SEQ ID NO: 2630 - RNA, 19 nt, Artificial Sequence
  source: /note="Description of Artificial Sequence: Synthetic oligonucleotide"
  source: /note="Antisense strand to SEQ ID NO: 2629"
cuguuuauuaaacaagcac

SEQ ID NO: 2631 - RNA, 19 nt, Artificial Sequence
  source: /note="Description of Artificial Sequence: Synthetic oligonucleotide"
  source: /note="Sense strand starting at position 2028 of SEQ ID NO: 3685"
guguuuauguaccacaacu

SEQ ID NO: 2632 - RNA, 19 nt, Artificial Sequence
  source: /note="Description of Artificial Sequence: Synthetic oligonucleotide"
  source: /note="Antisense strand to SEQ ID NO: 2631"
aguugugguacauaaacac

SEQ ID NO: 2633 - RNA, 19 nt, Artificial Sequence
  source: /note="Description of Artificial Sequence: Synthetic oligonucleotide"
  source: /note="Sense strand starting at position 2028 of SEQ ID NO: 3709"
guguauucuuuacugccua

SEQ ID NO: 2634 - RNA, 19 nt, Artificial Sequence
  source: /note="Description of Artificial Sequence: Synthetic oligonucleotide"
  source: /note="Antisense strand to SEQ ID NO: 2633"
uaggcaguaaagaauacac

SEQ ID NO: 2635 - RNA, 19 nt, Artificial Sequence
  source: /note="Description of Artificial Sequence: Synthetic oligonucleotide"
  source: /note="Sense strand starting at position 2028 of SEQ ID NO: 3710"
uguauucuuuacugccuau

SEQ ID NO: 2636 - RNA, 19 nt, Artificial Sequence
  source: /note="Description of Artificial Sequence: Synthetic oligonucleotide"
  source: /note="Antisense strand to SEQ ID NO: 2635"
auaggcaguaaagaauaca

SEQ ID NO: 2637 - RNA, 19 nt, Artificial Sequence
  source: /note="Description of Artificial Sequence: Synthetic oligonucleotide"
  source: /note="Sense strand starting at position 2028 of SEQ ID NO: 3806"
ugcauauccucagaaagac

SEQ ID NO: 2638 - RNA, 19 nt, Artificial Sequence
  source: /note="Description of Artificial Sequence: Synthetic oligonucleotide"
  source: /note="Antisense strand to SEQ ID NO: 2637"
gucuuucugaggauaugca

SEQ ID NO: 2639 - RNA, 19 nt, Artificial Sequence
  source: /note="Description of Artificial Sequence: Synthetic oligonucleotide"
  source: /note="Sense strand starting at position 2028 of SEQ ID NO: 3947"
gauugcuccuaugggcaua

SEQ ID NO: 2640 - RNA, 19 nt, Artificial Sequence
  source: /note="Description of Artificial Sequence: Synthetic oligonucleotide"
  source: /note="Antisense strand to SEQ ID NO: 2639"
uaugcccauaggagcaauc

SEQ ID NO: 2641 - RNA, 19 nt, Artificial Sequence
  source: /note="Description of Artificial Sequence: Synthetic oligonucleotide"
  source: /note="Sense strand starting at position 2027 of SEQ ID NO: 63"
ugcacuccauaaggaaaua

SEQ ID NO: 2642 - RNA, 19 nt, Artificial Sequence
  source: /note="Description of Artificial Sequence: Synthetic oligonucleotide"
  source: /note="Antisense strand to SEQ ID NO: 2641"
uauuuccuuauggagugca

SEQ ID NO: 2643 - RNA, 19 nt, Artificial Sequence
  source: /note="Description of Artificial Sequence: Synthetic oligonucleotide"
  source: /note="Sense strand starting at position 2027 of SEQ ID NO: 138"
cagggacauucuuggucaa

SEQ ID NO: 2644 - RNA, 19 nt, Artificial Sequence
  source: /note="Description of Artificial Sequence: Synthetic oligonucleotide"
  source: /note="Antisense strand to SEQ ID NO: 2643"
uugaccaagaaugucccug

SEQ ID NO: 2645 - RNA, 19 nt, Artificial Sequence
  source: /note="Description of Artificial Sequence: Synthetic oligonucleotide"
  source: /note="Sense strand starting at position 2027 of SEQ ID NO: 150"
uggucaaaguuagacaaua

SEQ ID NO: 2646 - RNA, 19 nt, Artificial Sequence
  source: /note="Description of Artificial Sequence: Synthetic oligonucleotide"
  source: /note="Antisense strand to SEQ ID NO: 2645"
uauugucuaacuuugacca

SEQ ID NO: 2647 - RNA, 19 nt, Artificial Sequence
  source: /note="Description of Artificial Sequence: Synthetic oligonucleotide"
  source: /note="Sense strand starting at position 2027 of SEQ ID NO: 158"
guuagacaauaugguaaau

SEQ ID NO: 2648 - RNA, 19 nt, Artificial Sequence
  source: /note="Description of Artificial Sequence: Synthetic oligonucleotide"
  source: /note="Antisense strand to SEQ ID NO: 2647"
auuuaccauauugucuaac

SEQ ID NO: 2649 - RNA, 19 nt, Artificial Sequence
  source: /note="Description of Artificial Sequence: Synthetic oligonucleotide"
  source: /note="Sense strand starting at position 2027 of SEQ ID NO: 237"
guaauugcauuguaaccau

SEQ ID NO: 2650 - RNA, 19 nt, Artificial Sequence
  source: /note="Description of Artificial Sequence: Synthetic oligonucleotide"
  source: /note="Antisense strand to SEQ ID NO: 2649"
augguuacaaugcaauuac

SEQ ID NO: 2651 - RNA, 19 nt, Artificial Sequence
  source: /note="Description of Artificial Sequence: Synthetic oligonucleotide"
  source: /note="Sense strand starting at position 2027 of SEQ ID NO: 435"
ucuaguaauugcgaucaca

SEQ ID NO: 2652 - RNA, 19 nt, Artificial Sequence
  source: /note="Description of Artificial Sequence: Synthetic oligonucleotide"
  source: /note="Antisense strand to SEQ ID NO: 2651"
ugugaucgcaauuacuaga

SEQ ID NO: 2653 - RNA, 19 nt, Artificial Sequence
  source: /note="Description of Artificial Sequence: Synthetic oligonucleotide"
  source: /note="Sense strand starting at position 2027 of SEQ ID NO: 694"
gagugcauguagcuauauu

SEQ ID NO: 2654 - RNA, 19 nt, Artificial Sequence
  source: /note="Description of Artificial Sequence: Synthetic oligonucleotide"
  source: /note="Antisense strand to SEQ ID NO: 2653"
aauauagcuacaugcacuc

SEQ ID NO: 2655 - RNA, 19 nt, Artificial Sequence
  source: /note="Description of Artificial Sequence: Synthetic oligonucleotide"
  source: /note="Sense strand starting at position 2027 of SEQ ID NO: 1109"
uugugauucgugggccuca

SEQ ID NO: 2656 - RNA, 19 nt, Artificial Sequence
  source: /note="Description of Artificial Sequence: Synthetic oligonucleotide"
  source: /note="Antisense strand to SEQ ID NO: 2655"
ugaggcccacgaaucacaa

SEQ ID NO: 2657 - RNA, 19 nt, Artificial Sequence
  source: /note="Description of Artificial Sequence: Synthetic oligonucleotide"
  source: /note="Sense strand starting at position 2027 of SEQ ID NO: 1254"
acguauugcuccugucuuu

SEQ ID NO: 2658 - RNA, 19 nt, Artificial Sequence
  source: /note="Description of Artificial Sequence: Synthetic oligonucleotide"
  source: /note="Antisense strand to SEQ ID NO: 2657"
aaagacaggagcaauacgu

SEQ ID NO: 2659 - RNA, 19 nt, Artificial Sequence
  source: /note="Description of Artificial Sequence: Synthetic oligonucleotide"
  source: /note="Sense strand starting at position 2027 of SEQ ID NO: 1261"
gcuccugucuuugaaaugu

SEQ ID NO: 2660 - RNA, 19 nt, Artificial Sequence
  source: /note="Description of Artificial Sequence: Synthetic oligonucleotide"
  source: /note="Antisense strand to SEQ ID NO: 2659"
acauuucaaagacaggagc

SEQ ID NO: 2661 - RNA, 19 nt, Artificial Sequence
  source: /note="Description of Artificial Sequence: Synthetic oligonucleotide"
  source: /note="Sense strand starting at position 2027 of SEQ ID NO: 1473"
gaagcugauucccagaugu

SEQ ID NO: 2662 - RNA, 19 nt, Artificial Sequence
  source: /note="Description of Artificial Sequence: Synthetic oligonucleotide"
  source: /note="Antisense strand to SEQ ID NO: 2661"
acaucugggaaucagcuuc

SEQ ID NO: 2663 - RNA, 19 nt, Artificial Sequence
  source: /note="Description of Artificial Sequence: Synthetic oligonucleotide"
  source: /note="Sense strand starting at position 2027 of SEQ ID NO: 1499"
ugggcuuccugaggcauuu

SEQ ID NO: 2664 - RNA, 19 nt, Artificial Sequence
  source: /note="Description of Artificial Sequence: Synthetic oligonucleotide"
  source: /note="Antisense strand to SEQ ID NO: 2663"
aaaugccucaggaagccca

SEQ ID NO: 2665 - RNA, 19 nt, Artificial Sequence
  source: /note="Description of Artificial Sequence: Synthetic oligonucleotide"
  source: /note="Sense strand starting at position 2027 of SEQ ID NO: 1525"
guccaccuugucugcaaua

SEQ ID NO: 2666 - RNA, 19 nt, Artificial Sequence
  source: /note="Description of Artificial Sequence: Synthetic oligonucleotide"
  source: /note="Antisense strand to SEQ ID NO: 2665"
uauugcagacaagguggac

SEQ ID NO: 2667 - RNA, 19 nt, Artificial Sequence
  source: /note="Description of Artificial Sequence: Synthetic oligonucleotide"
  source: /note="Sense strand starting at position 2027 of SEQ ID NO: 1548"
cugccaacugcuugucaau

SEQ ID NO: 2668 - RNA, 19 nt, Artificial Sequence
  source: /note="Description of Artificial Sequence: Synthetic oligonucleotide"
  source: /note="Antisense strand to SEQ ID NO: 2667"
auugacaagcaguuggcag

SEQ ID NO: 2669 - RNA, 19 nt, Artificial Sequence
  source: /note="Description of Artificial Sequence: Synthetic oligonucleotide"
  source: /note="Sense strand starting at position 2027 of SEQ ID NO: 1551"
ccaacugcuugucaaugaa

SEQ ID NO: 2670 - RNA, 19 nt, Artificial Sequence
  source: /note="Description of Artificial Sequence: Synthetic oligonucleotide"
  source: /note="Antisense strand to SEQ ID NO: 2669"
uucauugacaagcaguugg

SEQ ID NO: 2671 - RNA, 19 nt, Artificial Sequence
  source: /note="Description of Artificial Sequence: Synthetic oligonucleotide"
  source: /note="Sense strand starting at position 2027 of SEQ ID NO: 1673"
auaagaguguaucaguuaa

SEQ ID NO: 2672 - RNA, 19 nt, Artificial Sequence
  source: /note="Description of Artificial Sequence: Synthetic oligonucleotide"
  source: /note="Antisense strand to SEQ ID NO: 2671"
uuaacugauacacucuuau

SEQ ID NO: 2673 - RNA, 19 nt, Artificial Sequence
  source: /note="Description of Artificial Sequence: Synthetic oligonucleotide"
  source: /note="Sense strand starting at position 2027 of SEQ ID NO: 1694"
guuuacucuugauagcuuu

SEQ ID NO: 2674 - RNA, 19 nt, Artificial Sequence
  source: /note="Description of Artificial Sequence: Synthetic oligonucleotide"
  source: /note="Antisense strand to SEQ ID NO: 2673"
aaagcuaucaagaguaaac

SEQ ID NO: 2675 - RNA, 19 nt, Artificial Sequence
  source: /note="Description of Artificial Sequence: Synthetic oligonucleotide"
  source: /note="Sense strand starting at position 2027 of SEQ ID NO: 1714"
cuguaauccugcugaacaa

SEQ ID NO: 2676 - RNA, 19 nt, Artificial Sequence
  source: /note="Description of Artificial Sequence: Synthetic oligonucleotide"
  source: /note="Antisense strand to SEQ ID NO: 2675"
uuguucagcaggauuacag

SEQ ID NO: 2677 - RNA, 19 nt, Artificial Sequence
  source: /note="Description of Artificial Sequence: Synthetic oligonucleotide"
  source: /note="Sense strand starting at position 2027 of SEQ ID NO: 1785"
gcagcuuccuggcacucau

SEQ ID NO: 2678 - RNA, 19 nt, Artificial Sequence
  source: /note="Description of Artificial Sequence: Synthetic oligonucleotide"
  source: /note="Antisense strand to SEQ ID NO: 2677"
augagugccaggaagcugc

SEQ ID NO: 2679 - RNA, 19 nt, Artificial Sequence
  source: /note="Description of Artificial Sequence: Synthetic oligonucleotide"
  source: /note="Sense strand starting at position 2027 of SEQ ID NO: 1901"
cacguacauuaaggaaaua

SEQ ID NO: 2680 - RNA, 19 nt, Artificial Sequence
  source: /note="Description of Artificial Sequence: Synthetic oligonucleotide"
  source: /note="Antisense strand to SEQ ID NO: 2679"
uauuuccuuaauguacgug

SEQ ID NO: 2681 - RNA, 19 nt, Artificial Sequence
  source: /note="Description of Artificial Sequence: Synthetic oligonucleotide"
  source: /note="Sense strand starting at position 2027 of SEQ ID NO: 1962"
cugucuuucucaggucgaa

SEQ ID NO: 2682 - RNA, 19 nt, Artificial Sequence
  source: /note="Description of Artificial Sequence: Synthetic oligonucleotide"
  source: /note="Antisense strand to SEQ ID NO: 2681"
uucgaccugagaaagacag

SEQ ID NO: 2683 - RNA, 19 nt, Artificial Sequence
  source: /note="Description of Artificial Sequence: Synthetic oligonucleotide"
  source: /note="Sense strand starting at position 2027 of SEQ ID NO: 1989"
cugaucucauuauauaguu

SEQ ID NO: 2684 - RNA, 19 nt, Artificial Sequence
  source: /note="Description of Artificial Sequence: Synthetic oligonucleotide"
  source: /note="Antisense strand to SEQ ID NO: 2683"
aacuauauaaugagaucag

SEQ ID NO: 2685 - RNA, 19 nt, Artificial Sequence
  source: /note="Description of Artificial Sequence: Synthetic oligonucleotide"
  source: /note="Sense strand starting at position 2027 of SEQ ID NO: 2138"
agauaacagucugguuaaa

SEQ ID NO: 2686 - RNA, 19 nt, Artificial Sequence
  source: /note="Description of Artificial Sequence: Synthetic oligonucleotide"
  source: /note="Antisense strand to SEQ ID NO: 2685"
uuuaaccagacuguuaucu

SEQ ID NO: 2687 - RNA, 19 nt, Artificial Sequence
  source: /note="Description of Artificial Sequence: Synthetic oligonucleotide"
  source: /note="Sense strand starting at position 2027 of SEQ ID NO: 2253"
gguuuauguuacugcugaa

SEQ ID NO: 2688 - RNA, 19 nt, Artificial Sequence
  source: /note="Description of Artificial Sequence: Synthetic oligonucleotide"
  source: /note="Antisense strand to SEQ ID NO: 2687"
uucagcaguaacauaaacc

SEQ ID NO: 2689 - RNA, 19 nt, Artificial Sequence
  source: /note="Description of Artificial Sequence: Synthetic oligonucleotide"
  source: /note="Sense strand starting at position 2027 of SEQ ID NO: 2256"
uuauguuacugcugaagua

SEQ ID NO: 2690 - RNA, 19 nt, Artificial Sequence
  source: /note="Description of Artificial Sequence: Synthetic oligonucleotide"
  source: /note="Antisense strand to SEQ ID NO: 2689"
uacuucagcaguaacauaa

SEQ ID NO: 2691 - RNA, 19 nt, Artificial Sequence
  source: /note="Description of Artificial Sequence: Synthetic oligonucleotide"
  source: /note="Sense strand starting at position 2027 of SEQ ID NO: 2304"
ugcaauuaaucuugauugu

SEQ ID NO: 2692 - RNA, 19 nt, Artificial Sequence
  source: /note="Description of Artificial Sequence: Synthetic oligonucleotide"
  source: /note="Antisense strand to SEQ ID NO: 2691"
acaaucaagauuaauugca

SEQ ID NO: 2693 - RNA, 19 nt, Artificial Sequence
  source: /note="Description of Artificial Sequence: Synthetic oligonucleotide"
  source: /note="Sense strand starting at position 2027 of SEQ ID NO: 2450"
caggcaacuuauugggaau

SEQ ID NO: 2694 - RNA, 19 nt, Artificial Sequence
  source: /note="Description of Artificial Sequence: Synthetic oligonucleotide"
  source: /note="Antisense strand to SEQ ID NO: 2693"
auucccaauaaguugccug

SEQ ID NO: 2695 - RNA, 19 nt, Artificial Sequence
  source: /note="Description of Artificial Sequence: Synthetic oligonucleotide"
  source: /note="Sense strand starting at position 2027 of SEQ ID NO: 2516"
gcaugauuaucagguacaa

SEQ ID NO: 2696 - RNA, 19 nt, Artificial Sequence
  source: /note="Description of Artificial Sequence: Synthetic oligonucleotide"
  source: /note="Antisense strand to SEQ ID NO: 2695"
uuguaccugauaaucaugc

SEQ ID NO: 2697 - RNA, 19 nt, Artificial Sequence
  source: /note="Description of Artificial Sequence: Synthetic oligonucleotide"
  source: /note="Sense strand starting at position 2027 of SEQ ID NO: 2745"
caggaaguuuagugaugcu

SEQ ID NO: 2698 - RNA, 19 nt, Artificial Sequence
  source: /note="Description of Artificial Sequence: Synthetic oligonucleotide"
  source: /note="Antisense strand to SEQ ID NO: 2697"
agcaucacuaaacuuccug

SEQ ID NO: 2699 - RNA, 19 nt, Artificial Sequence
  source: /note="Description of Artificial Sequence: Synthetic oligonucleotide"
  source: /note="Sense strand starting at position 2027 of SEQ ID NO: 2748"
gaaguuuagugaugcugca

SEQ ID NO: 2700 - RNA, 19 nt, Artificial Sequence
  source: /note="Description of Artificial Sequence: Synthetic oligonucleotide"
  source: /note="Antisense strand to SEQ ID NO: 2699"
ugcagcaucacuaaacuuc

SEQ ID NO: 2701 - RNA, 19 nt, Artificial Sequence
  source: /note="Description of Artificial Sequence: Synthetic oligonucleotide"
  source: /note="Sense strand starting at position 2027 of SEQ ID NO: 2939"
ucuccauacuugcauguua

SEQ ID NO: 2702 - RNA, 19 nt, Artificial Sequence
  source: /note="Description of Artificial Sequence: Synthetic oligonucleotide"
  source: /note="Antisense strand to SEQ ID NO: 2701"
uaacaugcaaguauggaga

SEQ ID NO: 2703 - RNA, 19 nt, Artificial Sequence
  source: /note="Description of Artificial Sequence: Synthetic oligonucleotide"
  source: /note="Sense strand starting at position 2027 of SEQ ID NO: 3366"
gcugcaauguguucucuca

SEQ ID NO: 2704 - RNA, 19 nt, Artificial Sequence
  source: /note="Description of Artificial Sequence: Synthetic oligonucleotide"
  source: /note="Antisense strand to SEQ ID NO: 2703"
ugagagaacacauugcagc

SEQ ID NO: 2705 - RNA, 19 nt, Artificial Sequence
  source: /note="Description of Artificial Sequence: Synthetic oligonucleotide"
  source: /note="Sense strand starting at position 2027 of SEQ ID NO: 3420"
gugauucuuuacuguccuu

SEQ ID NO: 2706 - RNA, 19 nt, Artificial Sequence
  source: /note="Description of Artificial Sequence: Synthetic oligonucleotide"
  source: /note="Antisense strand to SEQ ID NO: 2705"
aaggacaguaaagaaucac

SEQ ID NO: 2707 - RNA, 19 nt, Artificial Sequence
  source: /note="Description of Artificial Sequence: Synthetic oligonucleotide"
  source: /note="Sense strand starting at position 2027 of SEQ ID NO: 3805"
uaauauaaguccugcuggu

SEQ ID NO: 2708 - RNA, 19 nt, Artificial Sequence
  source: /note="Description of Artificial Sequence: Synthetic oligonucleotide"
  source: /note="Antisense strand to SEQ ID NO: 2707"
accagcaggacuuauauua

SEQ ID NO: 2709 - RNA, 19 nt, Artificial Sequence
  source: /note="Description of Artificial Sequence: Synthetic oligonucleotide"
  source: /note="Sense strand starting at position 2027 of SEQ ID NO: 3979"
uucuuaauguaguggacau

SEQ ID NO: 2710 - RNA, 19 nt, Artificial Sequence
  source: /note="Description of Artificial Sequence: Synthetic oligonucleotide"
  source: /note="Antisense strand to SEQ ID NO: 2709"
auguccacuacauuaagaa

SEQ ID NO: 2711 - RNA, 19 nt, Artificial Sequence
  source: /note="Description of Artificial Sequence: Synthetic oligonucleotide"
  source: /note="Sense strand starting at position 2026 of SEQ ID NO: 41"
uccagcaagcugugguuua

SEQ ID NO: 2712 - RNA, 19 nt, Artificial Sequence
  source: /note="Description of Artificial Sequence: Synthetic oligonucleotide"
  source: /note="Antisense strand to SEQ ID NO: 2711"
uaaaccacagcuugcugga

SEQ ID NO: 2713 - RNA, 19 nt, Artificial Sequence
  source: /note="Description of Artificial Sequence: Synthetic oligonucleotide"
  source: /note="Sense strand starting at position 2026 of SEQ ID NO: 112"
guucuaaucuaucgucuuc

SEQ ID NO: 2714 - RNA, 19 nt, Artificial Sequence
  source: /note="Description of Artificial Sequence: Synthetic oligonucleotide"
  source: /note="Antisense strand to SEQ ID NO: 2713"
gaagacgauagauuagaac

SEQ ID NO: 2715 - RNA, 19 nt, Artificial Sequence
  source: /note="Description of Artificial Sequence: Synthetic oligonucleotide"
  source: /note="Sense strand starting at position 2026 of SEQ ID NO: 119"
ucuaucgucuuccaagagu

SEQ ID NO: 2716 - RNA, 19 nt, Artificial Sequence
  source: /note="Description of Artificial Sequence: Synthetic oligonucleotide"
  source: /note="Antisense strand to SEQ ID NO: 2715"
acucuuggaagacgauaga

SEQ ID NO: 2717 - RNA, 19 nt, Artificial Sequence
  source: /note="Description of Artificial Sequence: Synthetic oligonucleotide"
  source: /note="Sense strand starting at position 2026 of SEQ ID NO: 130"
ccaagagugugugggaaga

SEQ ID NO: 2718 - RNA, 19 nt, Artificial Sequence
  source: /note="Description of Artificial Sequence: Synthetic oligonucleotide"
  source: /note="Antisense strand to SEQ ID NO: 2717"
ucuucccacacacucuugg

SEQ ID NO: 2719 - RNA, 19 nt, Artificial Sequence
  source: /note="Description of Artificial Sequence: Synthetic oligonucleotide"
  source: /note="Sense strand starting at position 2026 of SEQ ID NO: 306"
cagcaaugucagcgagcuu

SEQ ID NO: 2720 - RNA, 19 nt, Artificial Sequence
  source: /note="Description of Artificial Sequence: Synthetic oligonucleotide"
  source: /note="Antisense strand to SEQ ID NO: 2719"
aagcucgcugacauugcug

SEQ ID NO: 2721 - RNA, 19 nt, Artificial Sequence
  source: /note="Description of Artificial Sequence: Synthetic oligonucleotide"
  source: /note="Sense strand starting at position 2026 of SEQ ID NO: 318"
cgagcuugguggcauaguu

SEQ ID NO: 2722 - RNA, 19 nt, Artificial Sequence
  source: /note="Description of Artificial Sequence: Synthetic oligonucleotide"
  source: /note="Antisense strand to SEQ ID NO: 2721"
aacuaugccaccaagcucg

SEQ ID NO: 2723 - RNA, 19 nt, Artificial Sequence
  source: /note="Description of Artificial Sequence: Synthetic oligonucleotide"
  source: /note="Sense strand starting at position 2026 of SEQ ID NO: 333"
aguucaagcugugaagguu

SEQ ID NO: 2724 - RNA, 19 nt, Artificial Sequence
  source: /note="Description of Artificial Sequence: Synthetic oligonucleotide"
  source: /note="Antisense strand to SEQ ID NO: 2723"
aaccuucacagcuugaacu

SEQ ID NO: 2725 - RNA, 19 nt, Artificial Sequence
  source: /note="Description of Artificial Sequence: Synthetic oligonucleotide"
  source: /note="Sense strand starting at position 2026 of SEQ ID NO: 364"
cgguaaacauugcaaauca

SEQ ID NO: 2726 - RNA, 19 nt, Artificial Sequence
  source: /note="Description of Artificial Sequence: Synthetic oligonucleotide"
  source: /note="Antisense strand to SEQ ID NO: 2725"
ugauuugcaauguuuaccg

SEQ ID NO: 2727 - RNA, 19 nt, Artificial Sequence
  source: /note="Description of Artificial Sequence: Synthetic oligonucleotide"
  source: /note="Sense strand starting at position 2026 of SEQ ID NO: 394"
gaugaaaugucaggcaaga

SEQ ID NO: 2728 - RNA, 19 nt, Artificial Sequence
  source: /note="Description of Artificial Sequence: Synthetic oligonucleotide"
  source: /note="Antisense strand to SEQ ID NO: 2727"
ucuugccugacauuucauc

SEQ ID NO: 2729 - RNA, 19 nt, Artificial Sequence
  source: /note="Description of Artificial Sequence: Synthetic oligonucleotide"
  source: /note="Sense strand starting at position 2026 of SEQ ID NO: 548"
aucuguaagugagaaauga

SEQ ID NO: 2730 - RNA, 19 nt, Artificial Sequence
  source: /note="Description of Artificial Sequence: Synthetic oligonucleotide"
  source: /note="Antisense strand to SEQ ID NO: 2729"
ucauuucucacuuacagau

SEQ ID NO: 2731 - RNA, 19 nt, Artificial Sequence
  source: /note="Description of Artificial Sequence: Synthetic oligonucleotide"
  source: /note="Sense strand starting at position 2026 of SEQ ID NO: 867"
aguauauauuggcaacaga

SEQ ID NO: 2732 - RNA, 19 nt, Artificial Sequence
  source: /note="Description of Artificial Sequence: Synthetic oligonucleotide"
  source: /note="Antisense strand to SEQ ID NO: 2731"
ucuguugccaauauauacu

SEQ ID NO: 2733 - RNA, 19 nt, Artificial Sequence
  source: /note="Description of Artificial Sequence: Synthetic oligonucleotide"
  source: /note="Sense strand starting at position 2026 of SEQ ID NO: 1058"
gucccaguuugcuuccuaa

SEQ ID NO: 2734 - RNA, 19 nt, Artificial Sequence
  source: /note="Description of Artificial Sequence: Synthetic oligonucleotide"
  source: /note="Antisense strand to SEQ ID NO: 2733"
uuaggaagcaaacugggac

SEQ ID NO: 2735 - RNA, 19 nt, Artificial Sequence
  source: /note="Description of Artificial Sequence: Synthetic oligonucleotide"
  source: /note="Sense strand starting at position 2026 of SEQ ID NO: 1072"
ccuaauaaguugugcuugu

SEQ ID NO: 2736 - RNA, 19 nt, Artificial Sequence
  source: /note="Description of Artificial Sequence: Synthetic oligonucleotide"
  source: /note="Antisense strand to SEQ ID NO: 2735"
acaagcacaacuuauuagg

SEQ ID NO: 2737 - RNA, 19 nt, Artificial Sequence
  source: /note="Description of Artificial Sequence: Synthetic oligonucleotide"
  source: /note="Sense strand starting at position 2026 of SEQ ID NO: 1076"
auaaguugugcuugucuaa

SEQ ID NO: 2738 - RNA, 19 nt, Artificial Sequence
  source: /note="Description of Artificial Sequence: Synthetic oligonucleotide"
  source: /note="Antisense strand to SEQ ID NO: 2737"
uuagacaagcacaacuuau

SEQ ID NO: 2739 - RNA, 19 nt, Artificial Sequence
  source: /note="Description of Artificial Sequence: Synthetic oligonucleotide"
  source: /note="Sense strand starting at position 2026 of SEQ ID NO: 1079"
aguugugcuugucuaaaca

SEQ ID NO: 2740 - RNA, 19 nt, Artificial Sequence
  source: /note="Description of Artificial Sequence: Synthetic oligonucleotide"
  source: /note="Antisense strand to SEQ ID NO: 2739"
uguuuagacaagcacaacu

SEQ ID NO: 2741 - RNA, 19 nt, Artificial Sequence
  source: /note="Description of Artificial Sequence: Synthetic oligonucleotide"
  source: /note="Sense strand starting at position 2026 of SEQ ID NO: 1133"
uccgucuucuuugauuaaa

SEQ ID NO: 2742 - RNA, 19 nt, Artificial Sequence
  source: /note="Description of Artificial Sequence: Synthetic oligonucleotide"
  source: /note="Antisense strand to SEQ ID NO: 2741"
uuuaaucaaagaagacgga

SEQ ID NO: 2743 - RNA, 19 nt, Artificial Sequence
  source: /note="Description of Artificial Sequence: Synthetic oligonucleotide"
  source: /note="Sense strand starting at position 2026 of SEQ ID NO: 1311"
gaauguagucuacguccuu

SEQ ID NO: 2744 - RNA, 19 nt, Artificial Sequence
  source: /note="Description of Artificial Sequence: Synthetic oligonucleotide"
  source: /note="Antisense strand to SEQ ID NO: 2743"
aaggacguagacuacauuc

SEQ ID NO: 2745 - RNA, 19 nt, Artificial Sequence
  source: /note="Description of Artificial Sequence: Synthetic oligonucleotide"
  source: /note="Sense strand starting at position 2026 of SEQ ID NO: 1366"
agauuaaggucuggauauu

SEQ ID NO: 2746 - RNA, 19 nt, Artificial Sequence
  source: /note="Description of Artificial Sequence: Synthetic oligonucleotide"
  source: /note="Antisense strand to SEQ ID NO: 2745"
aauauccagaccuuaaucu

SEQ ID NO: 2747 - RNA, 19 nt, Artificial Sequence
  source: /note="Description of Artificial Sequence: Synthetic oligonucleotide"
  source: /note="Sense strand starting at position 2026 of SEQ ID NO: 1489"
uuugcauuauccuauaggu

SEQ ID NO: 2748 - RNA, 19 nt, Artificial Sequence
  source: /note="Description of Artificial Sequence: Synthetic oligonucleotide"
  source: /note="Antisense strand to SEQ ID NO: 2747"
accuauaggauaaugcaaa

SEQ ID NO: 2749 - RNA, 19 nt, Artificial Sequence
  source: /note="Description of Artificial Sequence: Synthetic oligonucleotide"
  source: /note="Sense strand starting at position 2026 of SEQ ID NO: 1502"
auagguuauuggugucaaa

SEQ ID NO: 2750 - RNA, 19 nt, Artificial Sequence
  source: /note="Description of Artificial Sequence: Synthetic oligonucleotide"
  source: /note="Antisense strand to SEQ ID NO: 2749"
uuugacaccaauaaccuau

SEQ ID NO: 2751 - RNA, 19 nt, Artificial Sequence
  source: /note="Description of Artificial Sequence: Synthetic oligonucleotide"
  source: /note="Sense strand starting at position 2026 of SEQ ID NO: 1654"
cugaaugcuuguggaauuu

SEQ ID NO: 2752 - RNA, 19 nt, Artificial Sequence
  source: /note="Description of Artificial Sequence: Synthetic oligonucleotide"
  source: /note="Antisense strand to SEQ ID NO: 2751"
aaauuccacaagcauucag

SEQ ID NO: 2753 - RNA, 19 nt, Artificial Sequence
  source: /note="Description of Artificial Sequence: Synthetic oligonucleotide"
  source: /note="Sense strand starting at position 2026 of SEQ ID NO: 1682"
cugaauggcuguugcauuu

SEQ ID NO: 2754 - RNA, 19 nt, Artificial Sequence
  source: /note="Description of Artificial Sequence: Synthetic oligonucleotide"
  source: /note="Antisense strand to SEQ ID NO: 2753"
aaaugcaacagccauucag

SEQ ID NO: 2755 - RNA, 19 nt, Artificial Sequence
  source: /note="Description of Artificial Sequence: Synthetic oligonucleotide"
  source: /note="Sense strand starting at position 2026 of SEQ ID NO: 1844"
gagguagagucauagccaa

SEQ ID NO: 2756 - RNA, 19 nt, Artificial Sequence
  source: /note="Description of Artificial Sequence: Synthetic oligonucleotide"
  source: /note="Antisense strand to SEQ ID NO: 2755"
uuggcuaugacucuaccuc

SEQ ID NO: 2757 - RNA, 19 nt, Artificial Sequence
  source: /note="Description of Artificial Sequence: Synthetic oligonucleotide"
  source: /note="Sense strand starting at position 2026 of SEQ ID NO: 1947"
uccgguugccgugaauagu

SEQ ID NO: 2758 - RNA, 19 nt, Artificial Sequence
  source: /note="Description of Artificial Sequence: Synthetic oligonucleotide"
  source: /note="Antisense strand to SEQ ID NO: 2757"
acuauucacggcaaccgga

SEQ ID NO: 2759 - RNA, 19 nt, Artificial Sequence
  source: /note="Description of Artificial Sequence: Synthetic oligonucleotide"
  source: /note="Sense strand starting at position 2026 of SEQ ID NO: 2104"
aacugugucgucugcuuua

SEQ ID NO: 2760 - RNA, 19 nt, Artificial Sequence
  source: /note="Description of Artificial Sequence: Synthetic oligonucleotide"
  source: /note="Antisense strand to SEQ ID NO: 2759"
uaaagcagacgacacaguu

SEQ ID NO: 2761 - RNA, 19 nt, Artificial Sequence
  source: /note="Description of Artificial Sequence: Synthetic oligonucleotide"
  source: /note="Sense strand starting at position 2026 of SEQ ID NO: 2107"
ugugucgucugcuuuauau

SEQ ID NO: 2762 - RNA, 19 nt, Artificial Sequence
  source: /note="Description of Artificial Sequence: Synthetic oligonucleotide"
  source: /note="Antisense strand to SEQ ID NO: 2761"
auauaaagcagacgacaca

SEQ ID NO: 2763 - RNA, 19 nt, Artificial Sequence
  source: /note="Description of Artificial Sequence: Synthetic oligonucleotide"
  source: /note="Sense strand starting at position 2026 of SEQ ID NO: 2111"
ucgucugcuuuauauagga

SEQ ID NO: 2764 - RNA, 19 nt, Artificial Sequence
  source: /note="Description of Artificial Sequence: Synthetic oligonucleotide"
  source: /note="Antisense strand to SEQ ID NO: 2763"
uccuauauaaagcagacga

SEQ ID NO: 2765 - RNA, 19 nt, Artificial Sequence
  source: /note="Description of Artificial Sequence: Synthetic oligonucleotide"
  source: /note="Sense strand starting at position 2026 of SEQ ID NO: 2171"
ggagcugauuauuaugaag

SEQ ID NO: 2766 - RNA, 19 nt, Artificial Sequence
  source: /note="Description of Artificial Sequence: Synthetic oligonucleotide"
  source: /note="Antisense strand to SEQ ID NO: 2765"
cuucauaauaaucagcucc

SEQ ID NO: 2767 - RNA, 19 nt, Artificial Sequence
  source: /note="Description of Artificial Sequence: Synthetic oligonucleotide"
  source: /note="Sense strand starting at position 2026 of SEQ ID NO: 2173"
agcugauuauuaugaagac

SEQ ID NO: 2768 - RNA, 19 nt, Artificial Sequence
  source: /note="Description of Artificial Sequence: Synthetic oligonucleotide"
  source: /note="Antisense strand to SEQ ID NO: 2767"
gucuucauaauaaucagcu

SEQ ID NO: 2769 - RNA, 19 nt, Artificial Sequence
  source: /note="Description of Artificial Sequence: Synthetic oligonucleotide"
  source: /note="Sense strand starting at position 2026 of SEQ ID NO: 2174"
gcugauuauuaugaagaca

SEQ ID NO: 2770 - RNA, 19 nt, Artificial Sequence
  source: /note="Description of Artificial Sequence: Synthetic oligonucleotide"
  source: /note="Antisense strand to SEQ ID NO: 2769"
ugucuucauaauaaucagc

SEQ ID NO: 2771 - RNA, 19 nt, Artificial Sequence
  source: /note="Description of Artificial Sequence: Synthetic oligonucleotide"
  source: /note="Sense strand starting at position 2026 of SEQ ID NO: 2240"
uaugcaaacugguguuagu

SEQ ID NO: 2772 - RNA, 19 nt, Artificial Sequence
  source: /note="Description of Artificial Sequence: Synthetic oligonucleotide"
  source: /note="Antisense strand to SEQ ID NO: 2771"
acuaacaccaguuugcaua

SEQ ID NO: 2773 - RNA, 19 nt, Artificial Sequence
  source: /note="Description of Artificial Sequence: Synthetic oligonucleotide"
  source: /note="Sense strand starting at position 2026 of SEQ ID NO: 2243"
gcaaacugguguuagugaa

SEQ ID NO: 2774 - RNA, 19 nt, Artificial Sequence
  source: /note="Description of Artificial Sequence: Synthetic oligonucleotide"
  source: /note="Antisense strand to SEQ ID NO: 2773"
uucacuaacaccaguuugc

SEQ ID NO: 2775 - RNA, 19 nt, Artificial Sequence
  source: /note="Description of Artificial Sequence: Synthetic oligonucleotide"
  source: /note="Sense strand starting at position 2026 of SEQ ID NO: 2324"
gugugaugcuaggagaaga

SEQ ID NO: 2776 - RNA, 19 nt, Artificial Sequence
  source: /note="Description of Artificial Sequence: Synthetic oligonucleotide"
  source: /note="Antisense strand to SEQ ID NO: 2775"
ucuucuccuagcaucacac

SEQ ID NO: 2777 - RNA, 19 nt, Artificial Sequence
  source: /note="Description of Artificial Sequence: Synthetic oligonucleotide"
  source: /note="Sense strand starting at position 2026 of SEQ ID NO: 2503"
guuaauucuuaaggcaaau

SEQ ID NO: 2778 - RNA, 19 nt, Artificial Sequence
  source: /note="Description of Artificial Sequence: Synthetic oligonucleotide"
  source: /note="Antisense strand to SEQ ID NO: 2777"
auuugccuuaagaauuaac

SEQ ID NO: 2779 - RNA, 19 nt, Artificial Sequence
  source: /note="Description of Artificial Sequence: Synthetic oligonucleotide"
  source: /note="Sense strand starting at position 2026 of SEQ ID NO: 2649"
acagaauugugucaggcuu

SEQ ID NO: 2780 - RNA, 19 nt, Artificial Sequence
  source: /note="Description of Artificial Sequence: Synthetic oligonucleotide"
  source: /note="Antisense strand to SEQ ID NO: 2779"
aagccugacacaauucugu

SEQ ID NO: 2781 - RNA, 19 nt, Artificial Sequence
  source: /note="Description of Artificial Sequence: Synthetic oligonucleotide"
  source: /note="Sense strand starting at position 2026 of SEQ ID NO: 2651"
agaauugugucaggcuucu

SEQ ID NO: 2782 - RNA, 19 nt, Artificial Sequence
  source: /note="Description of Artificial Sequence: Synthetic oligonucleotide"
  source: /note="Antisense strand to SEQ ID NO: 2781"
agaagccugacacaauucu

SEQ ID NO: 2783 - RNA, 19 nt, Artificial Sequence
  source: /note="Description of Artificial Sequence: Synthetic oligonucleotide"
  source: /note="Sense strand starting at position 2026 of SEQ ID NO: 2657"
gugucaggcuucuguaaug

SEQ ID NO: 2784 - RNA, 19 nt, Artificial Sequence
  source: /note="Description of Artificial Sequence: Synthetic oligonucleotide"
  source: /note="Antisense strand to SEQ ID NO: 2783"
cauuacagaagccugacac

SEQ ID NO: 2785 - RNA, 19 nt, Artificial Sequence
  source: /note="Description of Artificial Sequence: Synthetic oligonucleotide"
  source: /note="Sense strand starting at position 2026 of SEQ ID NO: 3160"
ccgugcuggcaguaaguua

SEQ ID NO: 2786 - RNA, 19 nt, Artificial Sequence
  source: /note="Description of Artificial Sequence: Synthetic oligonucleotide"
  source: /note="Antisense strand to SEQ ID NO: 2785"
uaacuuacugccagcacgg

SEQ ID NO: 2787 - RNA, 19 nt, Artificial Sequence
  source: /note="Description of Artificial Sequence: Synthetic oligonucleotide"
  source: /note="Sense strand starting at position 2026 of SEQ ID NO: 3253"
aggagguguuggugggaaa

SEQ ID NO: 2788 - RNA, 19 nt, Artificial Sequence
  source: /note="Description of Artificial Sequence: Synthetic oligonucleotide"
  source: /note="Antisense strand to SEQ ID NO: 2787"
uuucccaccaacaccuccu

SEQ ID NO: 2789 - RNA, 19 nt, Artificial Sequence
  source: /note="Description of Artificial Sequence: Synthetic oligonucleotide"
  source: /note="Sense strand starting at position 2026 of SEQ ID NO: 3274"
ucucauuaaucguaccgua

SEQ ID NO: 2790 - RNA, 19 nt, Artificial Sequence
  source: /note="Description of Artificial Sequence: Synthetic oligonucleotide"
  source: /note="Antisense strand to SEQ ID NO: 2789"
uacgguacgauuaaugaga

SEQ ID NO: 2791 - RNA, 19 nt, Artificial Sequence
  source: /note="Description of Artificial Sequence: Synthetic oligonucleotide"
  source: /note="Sense strand starting at position 2026 of SEQ ID NO: 3277"
cauuaaucguaccguauuc

SEQ ID NO: 2792 - RNA, 19 nt, Artificial Sequence
  source: /note="Description of Artificial Sequence: Synthetic oligonucleotide"
  source: /note="Antisense strand to SEQ ID NO: 2791"
gaauacgguacgauuaaug

SEQ ID NO: 2793 - RNA, 19 nt, Artificial Sequence
  source: /note="Description of Artificial Sequence: Synthetic oligonucleotide"
  source: /note="Sense strand starting at position 2026 of SEQ ID NO: 3287"
accguauucccuugucuac

SEQ ID NO: 2794 - RNA, 19 nt, Artificial Sequence
  source: /note="Description of Artificial Sequence: Synthetic oligonucleotide"
  source: /note="Antisense strand to SEQ ID NO: 2793"
guagacaagggaauacggu

SEQ ID NO: 2795 - RNA, 19 nt, Artificial Sequence
  source: /note="Description of Artificial Sequence: Synthetic oligonucleotide"
  source: /note="Sense strand starting at position 2026 of SEQ ID NO: 3338"
aaagaaaccuuguagcaug

SEQ ID NO: 2796 - RNA, 19 nt, Artificial Sequence
  source: /note="Description of Artificial Sequence: Synthetic oligonucleotide"
  source: /note="Antisense strand to SEQ ID NO: 2795"
caugcuacaagguuucuuu

SEQ ID NO: 2797 - RNA, 19 nt, Artificial Sequence
  source: /note="Description of Artificial Sequence: Synthetic oligonucleotide"
  source: /note="Sense strand starting at position 2026 of SEQ ID NO: 3341"
gaaaccuuguagcaugagu

SEQ ID NO: 2798 - RNA, 19 nt, Artificial Sequence
  source: /note="Description of Artificial Sequence: Synthetic oligonucleotide"
  source: /note="Antisense strand to SEQ ID NO: 2797"
acucaugcuacaagguuuc

SEQ ID NO: 2799 - RNA, 19 nt, Artificial Sequence
  source: /note="Description of Artificial Sequence: Synthetic oligonucleotide"
  source: /note="Sense strand starting at position 2026 of SEQ ID NO: 3433"
ucguacugcuuagaaagau

SEQ ID NO: 2800 - RNA, 19 nt, Artificial Sequence
  source: /note="Description of Artificial Sequence: Synthetic oligonucleotide"
  source: /note="Antisense strand to SEQ ID NO: 2799"
aucuuucuaagcaguacga

SEQ ID NO: 2801 - RNA, 19 nt, Artificial Sequence
  source: /note="Description of Artificial Sequence: Synthetic oligonucleotide"
  source: /note="Sense strand starting at position 2026 of SEQ ID NO: 3447"
aagauuaguugaggguauu

SEQ ID NO: 2802 - RNA, 19 nt, Artificial Sequence
  source: /note="Description of Artificial Sequence: Synthetic oligonucleotide"
  source: /note="Antisense strand to SEQ ID NO: 2801"
aauacccucaacuaaucuu

SEQ ID NO: 2803 - RNA, 19 nt, Artificial Sequence
  source: /note="Description of Artificial Sequence: Synthetic oligonucleotide"
  source: /note="Sense strand starting at position 2026 of SEQ ID NO: 3459"
ggguauuucuucuguggua

SEQ ID NO: 2804 - RNA, 19 nt, Artificial Sequence
  source: /note="Description of Artificial Sequence: Synthetic oligonucleotide"
  source: /note="Antisense strand to SEQ ID NO: 2803"
uaccacagaagaaauaccc

SEQ ID NO: 2805 - RNA, 19 nt, Artificial Sequence
  source: /note="Description of Artificial Sequence: Synthetic oligonucleotide"
  source: /note="Sense strand starting at position 2026 of SEQ ID NO: 3464"
uuucuucugugguauuacu

SEQ ID NO: 2806 - RNA, 19 nt, Artificial Sequence
  source: /note="Description of Artificial Sequence: Synthetic oligonucleotide"
  source: /note="Antisense strand to SEQ ID NO: 2805"
aguaauaccacagaagaaa

SEQ ID NO: 2807 - RNA, 19 nt, Artificial Sequence
  source: /note="Description of Artificial Sequence: Synthetic oligonucleotide"
  source: /note="Sense strand starting at position 2026 of SEQ ID NO: 3472"
gugguauuacuuuaggcgu

SEQ ID NO: 2808 - RNA, 19 nt, Artificial Sequence
  source: /note="Description of Artificial Sequence: Synthetic oligonucleotide"
  source: /note="Antisense strand to SEQ ID NO: 2807"
acgccuaaaguaauaccac

SEQ ID NO: 2809 - RNA, 19 nt, Artificial Sequence
  source: /note="Description of Artificial Sequence: Synthetic oligonucleotide"
  source: /note="Sense strand starting at position 2026 of SEQ ID NO: 3474"
gguauuacuuuaggcguuu

SEQ ID NO: 2810 - RNA, 19 nt, Artificial Sequence
  source: /note="Description of Artificial Sequence: Synthetic oligonucleotide"
  source: /note="Antisense strand to SEQ ID NO: 2809"
aaacgccuaaaguaauacc

SEQ ID NO: 2811 - RNA, 19 nt, Artificial Sequence
  source: /note="Description of Artificial Sequence: Synthetic oligonucleotide"
  source: /note="Sense strand starting at position 2026 of SEQ ID NO: 3639"
gggccaaaguuagagaaau

SEQ ID NO: 2812 - RNA, 19 nt, Artificial Sequence
  source: /note="Description of Artificial Sequence: Synthetic oligonucleotide"
  source: /note="Antisense strand to SEQ ID NO: 2811"
auuucucuaacuuuggccc

SEQ ID NO: 2813 - RNA, 19 nt, Artificial Sequence
  source: /note="Description of Artificial Sequence: Synthetic oligonucleotide"
  source: /note="Sense strand starting at position 2026 of SEQ ID NO: 3667"
aguaguuaauugcagaagu

SEQ ID NO: 2814 - RNA, 19 nt, Artificial Sequence
  source: /note="Description of Artificial Sequence: Synthetic oligonucleotide"
  source: /note="Antisense strand to SEQ ID NO: 2813"
acuucugcaauuaacuacu

SEQ ID NO: 2815 - RNA, 19 nt, Artificial Sequence
  source: /note="Description of Artificial Sequence: Synthetic oligonucleotide"
  source: /note="Sense strand starting at position 2026 of SEQ ID NO: 3735"
gaaauuagcucuuggccag

SEQ ID NO: 2816 - RNA, 19 nt, Artificial Sequence
  source: /note="Description of Artificial Sequence: Synthetic oligonucleotide"
  source: /note="Antisense strand to SEQ ID NO: 2815"
cuggccaagagcuaauuuc

SEQ ID NO: 2817 - RNA, 19 nt, Artificial Sequence
  source: /note="Description of Artificial Sequence: Synthetic oligonucleotide"
  source: /note="Sense strand starting at position 2026 of SEQ ID NO: 3817"
gcaguacugucugaugaag

SEQ ID NO: 2818 - RNA, 19 nt, Artificial Sequence
  source: /note="Description of Artificial Sequence: Synthetic oligonucleotide"
  source: /note="Antisense strand to SEQ ID NO: 2817"
cuucaucagacaguacugc

SEQ ID NO: 2819 - RNA, 19 nt, Artificial Sequence
  source: /note="Description of Artificial Sequence: Synthetic oligonucleotide"
  source: /note="Sense strand starting at position 2026 of SEQ ID NO: 3897"
aggauugcuuucugaucau

SEQ ID NO: 2820 - RNA, 19 nt, Artificial Sequence
  source: /note="Description of Artificial Sequence: Synthetic oligonucleotide"
  source: /note="Antisense strand to SEQ ID NO: 2819"
augaucagaaagcaauccu

SEQ ID NO: 2821 - RNA, 19 nt, Artificial Sequence
  source: /note="Description of Artificial Sequence: Synthetic oligonucleotide"
  source: /note="Sense strand starting at position 2026 of SEQ ID NO: 3937"
cuuggcaucugggaacauu

SEQ ID NO: 2822 - RNA, 19 nt, Artificial Sequence
  source: /note="Description of Artificial Sequence: Synthetic oligonucleotide"
  source: /note="Antisense strand to SEQ ID NO: 2821"
aauguucccagaugccaag

SEQ ID NO: 2823 - RNA, 19 nt, Artificial Sequence
  source: /note="Description of Artificial Sequence: Synthetic oligonucleotide"
  source: /note="Sense strand starting at position 2025 of SEQ ID NO: 40"
uccagcaagcugugguuua

SEQ ID NO: 2824 - RNA, 19 nt, Artificial Sequence
  source: /note="Description of Artificial Sequence: Synthetic oligonucleotide"
  source: /note="Antisense strand to SEQ ID NO: 2823"
uaaaccacagcuugcugga

SEQ ID NO: 2825 - RNA, 19 nt, Artificial Sequence
  source: /note="Description of Artificial Sequence: Synthetic oligonucleotide"
  source: /note="Sense strand starting at position 2025 of SEQ ID NO: 111"
guucuaaucuaucgucuuc

SEQ ID NO: 2826 - RNA, 19 nt, Artificial Sequence
  source: /note="Description of Artificial Sequence: Synthetic oligonucleotide"
  source: /note="Antisense strand to SEQ ID NO: 2825"
gaagacgauagauuagaac

SEQ ID NO: 2827 - RNA, 19 nt, Artificial Sequence
  source: /note="Description of Artificial Sequence: Synthetic oligonucleotide"
  source: /note="Sense strand starting at position 2025 of SEQ ID NO: 118"
ucuaucgucuuccaagagu

SEQ ID NO: 2828 - RNA, 19 nt, Artificial Sequence
  source: /note="Description of Artificial Sequence: Synthetic oligonucleotide"
  source: /note="Antisense strand to SEQ ID NO: 2827"
acucuuggaagacgauaga

SEQ ID NO: 2829 - RNA, 19 nt, Artificial Sequence
  source: /note="Description of Artificial Sequence: Synthetic oligonucleotide"
  source: /note="Sense strand starting at position 2025 of SEQ ID NO: 129"
ccaagagugugugggaaga

SEQ ID NO: 2830 - RNA, 19 nt, Artificial Sequence
  source: /note="Description of Artificial Sequence: Synthetic oligonucleotide"
  source: /note="Antisense strand to SEQ ID NO: 2829"
ucuucccacacacucuugg

SEQ ID NO: 2831 - RNA, 19 nt, Artificial Sequence
  source: /note="Description of Artificial Sequence: Synthetic oligonucleotide"
  source: /note="Sense strand starting at position 2025 of SEQ ID NO: 305"
cagcaaugucagcgagcuu

SEQ ID NO: 2832 - RNA, 19 nt, Artificial Sequence
  source: /note="Description of Artificial Sequence: Synthetic oligonucleotide"
  source: /note="Antisense strand to SEQ ID NO: 2831"
aagcucgcugacauugcug

SEQ ID NO: 2833 - RNA, 19 nt, Artificial Sequence
  source: /note="Description of Artificial Sequence: Synthetic oligonucleotide"
  source: /note="Sense strand starting at position 2025 of SEQ ID NO: 314"
cagcgagcuugguggcaua

SEQ ID NO: 2834 - RNA, 19 nt, Artificial Sequence
  source: /note="Description of Artificial Sequence: Synthetic oligonucleotide"
  source: /note="Antisense strand to SEQ ID NO: 2833"
uaugccaccaagcucgcug

SEQ ID NO: 2835 - RNA, 19 nt, Artificial Sequence
  source: /note="Description of Artificial Sequence: Synthetic oligonucleotide"
  source: /note="Sense strand starting at position 2025 of SEQ ID NO: 317"
cgagcuugguggcauaguu

SEQ ID NO: 2836 - RNA, 19 nt, Artificial Sequence
  source: /note="Description of Artificial Sequence: Synthetic oligonucleotide"
  source: /note="Antisense strand to SEQ ID NO: 2835"
aacuaugccaccaagcucg

SEQ ID NO: 2837 - RNA, 19 nt, Artificial Sequence
  source: /note="Description of Artificial Sequence: Synthetic oligonucleotide"
  source: /note="Sense strand starting at position 2025 of SEQ ID NO: 332"
aguucaagcugugaagguu

SEQ ID NO: 2838 - RNA, 19 nt, Artificial Sequence
  source: /note="Description of Artificial Sequence: Synthetic oligonucleotide"
  source: /note="Antisense strand to SEQ ID NO: 2837"
aaccuucacagcuugaacu

SEQ ID NO: 2839 - RNA, 19 nt, Artificial Sequence
  source: /note="Description of Artificial Sequence: Synthetic oligonucleotide"
  source: /note="Sense strand starting at position 2025 of SEQ ID NO: 363"
cgguaaacauugcaaauca

SEQ ID NO: 2840 - RNA, 19 nt, Artificial Sequence
  source: /note="Description of Artificial Sequence: Synthetic oligonucleotide"
  source: /note="Antisense strand to SEQ ID NO: 2839"
ugauuugcaauguuuaccg

SEQ ID NO: 2841 - RNA, 19 nt, Artificial Sequence
  source: /note="Description of Artificial Sequence: Synthetic oligonucleotide"
  source: /note="Sense strand starting at position 2025 of SEQ ID NO: 393"
gaugaaaugucaggcaaga

SEQ ID NO: 2842 - RNA, 19 nt, Artificial Sequence
  source: /note="Description of Artificial Sequence: Synthetic oligonucleotide"
  source: /note="Antisense strand to SEQ ID NO: 2841"
ucuugccugacauuucauc

SEQ ID NO: 2843 - RNA, 19 nt, Artificial Sequence
  source: /note="Description of Artificial Sequence: Synthetic oligonucleotide"
  source: /note="Sense strand starting at position 2025 of SEQ ID NO: 547"
aucuguaagugagaaauga

SEQ ID NO: 2844 - RNA, 19 nt, Artificial Sequence
  source: /note="Description of Artificial Sequence: Synthetic oligonucleotide"
  source: /note="Antisense strand to SEQ ID NO: 2843"
ucauuucucacuuacagau

SEQ ID NO: 2845 - RNA, 19 nt, Artificial Sequence
  source: /note="Description of Artificial Sequence: Synthetic oligonucleotide"
  source: /note="Sense strand starting at position 2025 of SEQ ID NO: 866"
aguauauauuggcaacaga

SEQ ID NO: 2846 - RNA, 19 nt, Artificial Sequence
  source: /note="Description of Artificial Sequence: Synthetic oligonucleotide"
  source: /note="Antisense strand to SEQ ID NO: 2845"
ucuguugccaauauauacu

SEQ ID NO: 2847 - RNA, 19 nt, Artificial Sequence
  source: /note="Description of Artificial Sequence: Synthetic oligonucleotide"
  source: /note="Sense strand starting at position 2025 of SEQ ID NO: 1057"
gucccaguuugcuuccuaa

SEQ ID NO: 2848 - RNA, 19 nt, Artificial Sequence
  source: /note="Description of Artificial Sequence: Synthetic oligonucleotide"
  source: /note="Antisense strand to SEQ ID NO: 2847"
uuaggaagcaaacugggac

SEQ ID NO: 2849 - RNA, 19 nt, Artificial Sequence
  source: /note="Description of Artificial Sequence: Synthetic oligonucleotide"
  source: /note="Sense strand starting at position 2025 of SEQ ID NO: 1071"
ccuaauaaguugugcuugu

SEQ ID NO: 2850 - RNA, 19 nt, Artificial Sequence
  source: /note="Description of Artificial Sequence: Synthetic oligonucleotide"
  source: /note="Antisense strand to SEQ ID NO: 2849"
acaagcacaacuuauuagg

SEQ ID NO: 2851 - RNA, 19 nt, Artificial Sequence
  source: /note="Description of Artificial Sequence: Synthetic oligonucleotide"
  source: /note="Sense strand starting at position 2025 of SEQ ID NO: 1075"
auaaguugugcuugucuaa

SEQ ID NO: 2852 - RNA, 19 nt, Artificial Sequence
  source: /note="Description of Artificial Sequence: Synthetic oligonucleotide"
  source: /note="Antisense strand to SEQ ID NO: 2851"
uuagacaagcacaacuuau

SEQ ID NO: 2853 - RNA, 19 nt, Artificial Sequence
  source: /note="Description of Artificial Sequence: Synthetic oligonucleotide"
  source: /note="Sense strand starting at position 2025 of SEQ ID NO: 1078"
aguugugcuugucuaaaca

SEQ ID NO: 2854 - RNA, 19 nt, Artificial Sequence
  source: /note="Description of Artificial Sequence: Synthetic oligonucleotide"
  source: /note="Antisense strand to SEQ ID NO: 2853"
uguuuagacaagcacaacu

SEQ ID NO: 2855 - RNA, 19 nt, Artificial Sequence
  source: /note="Description of Artificial Sequence: Synthetic oligonucleotide"
  source: /note="Sense strand starting at position 2025 of SEQ ID NO: 1132"
uccgucuucuuugauuaaa

SEQ ID NO: 2856 - RNA, 19 nt, Artificial Sequence
  source: /note="Description of Artificial Sequence: Synthetic oligonucleotide"
  source: /note="Antisense strand to SEQ ID NO: 2855"
uuuaaucaaagaagacgga

SEQ ID NO: 2857 - RNA, 19 nt, Artificial Sequence
  source: /note="Description of Artificial Sequence: Synthetic oligonucleotide"
  source: /note="Sense strand starting at position 2025 of SEQ ID NO: 1310"
gaauguagucuacguccuu

SEQ ID NO: 2858 - RNA, 19 nt, Artificial Sequence
  source: /note="Description of Artificial Sequence: Synthetic oligonucleotide"
  source: /note="Antisense strand to SEQ ID NO: 2857"
aaggacguagacuacauuc

SEQ ID NO: 2859 - RNA, 19 nt, Artificial Sequence
  source: /note="Description of Artificial Sequence: Synthetic oligonucleotide"
  source: /note="Sense strand starting at position 2025 of SEQ ID NO: 1365"
agauuaaggucuggauauu

SEQ ID NO: 2860 - RNA, 19 nt, Artificial Sequence
  source: /note="Description of Artificial Sequence: Synthetic oligonucleotide"
  source: /note="Antisense strand to SEQ ID NO: 2859"
aauauccagaccuuaaucu

SEQ ID NO: 2861 - RNA, 19 nt, Artificial Sequence
  source: /note="Description of Artificial Sequence: Synthetic oligonucleotide"
  source: /note="Sense strand starting at position 2025 of SEQ ID NO: 1488"
uuugcauuauccuauaggu

SEQ ID NO: 2862 - RNA, 19 nt, Artificial Sequence
  source: /note="Description of Artificial Sequence: Synthetic oligonucleotide"
  source: /note="Antisense strand to SEQ ID NO: 2861"
accuauaggauaaugcaaa

SEQ ID NO: 2863 - RNA, 19 nt, Artificial Sequence
  source: /note="Description of Artificial Sequence: Synthetic oligonucleotide"
  source: /note="Sense strand starting at position 2025 of SEQ ID NO: 1501"
auagguuauuggugucaaa

SEQ ID NO: 2864 - RNA, 19 nt, Artificial Sequence
  source: /note="Description of Artificial Sequence: Synthetic oligonucleotide"
  source: /note="Antisense strand to SEQ ID NO: 2863"
uuugacaccaauaaccuau

SEQ ID NO: 2865 - RNA, 19 nt, Artificial Sequence
  source: /note="Description of Artificial Sequence: Synthetic oligonucleotide"
  source: /note="Sense strand starting at position 2025 of SEQ ID NO: 1653"
cugaaugcuuguggaauuu

SEQ ID NO: 2866 - RNA, 19 nt, Artificial Sequence
  source: /note="Description of Artificial Sequence: Synthetic oligonucleotide"
  source: /note="Antisense strand to SEQ ID NO: 2865"
aaauuccacaagcauucag

SEQ ID NO: 2867 - RNA, 19 nt, Artificial Sequence
  source: /note="Description of Artificial Sequence: Synthetic oligonucleotide"
  source: /note="Sense strand starting at position 2025 of SEQ ID NO: 1681"
cugaauggcuguugcauuu

SEQ ID NO: 2868 - RNA, 19 nt, Artificial Sequence
  source: /note="Description of Artificial Sequence: Synthetic oligonucleotide"
  source: /note="Antisense strand to SEQ ID NO: 2867"
aaaugcaacagccauucag

SEQ ID NO: 2869 - RNA, 19 nt, Artificial Sequence
  source: /note="Description of Artificial Sequence: Synthetic oligonucleotide"
  source: /note="Sense strand starting at position 2025 of SEQ ID NO: 1843"
gagguagagucauagccaa

SEQ ID NO: 2870 - RNA, 19 nt, Artificial Sequence
  source: /note="Description of Artificial Sequence: Synthetic oligonucleotide"
  source: /note="Antisense strand to SEQ ID NO: 2869"
uuggcuaugacucuaccuc

SEQ ID NO: 2871 - RNA, 19 nt, Artificial Sequence
  source: /note="Description of Artificial Sequence: Synthetic oligonucleotide"
  source: /note="Sense strand starting at position 2025 of SEQ ID NO: 1946"
uccgguugccgugaauagu

SEQ ID NO: 2872 - RNA, 19 nt, Artificial Sequence
  source: /note="Description of Artificial Sequence: Synthetic oligonucleotide"
  source: /note="Antisense strand to SEQ ID NO: 2871"
acuauucacggcaaccgga

SEQ ID NO: 2873 - RNA, 19 nt, Artificial Sequence
  source: /note="Description of Artificial Sequence: Synthetic oligonucleotide"
  source: /note="Sense strand starting at position 2025 of SEQ ID NO: 2103"
aacugugucgucugcuuua

SEQ ID NO: 2874 - RNA, 19 nt, Artificial Sequence
  source: /note="Description of Artificial Sequence: Synthetic oligonucleotide"
  source: /note="Antisense strand to SEQ ID NO: 2873"
uaaagcagacgacacaguu

SEQ ID NO: 2875 - RNA, 19 nt, Artificial Sequence
  source: /note="Description of Artificial Sequence: Synthetic oligonucleotide"
  source: /note="Sense strand starting at position 2025 of SEQ ID NO: 2106"
ugugucgucugcuuuauau

SEQ ID NO: 2876 - RNA, 19 nt, Artificial Sequence
  source: /note="Description of Artificial Sequence: Synthetic oligonucleotide"
  source: /note="Antisense strand to SEQ ID NO: 2875"
auauaaagcagacgacaca

SEQ ID NO: 2877 - RNA, 19 nt, Artificial Sequence
  source: /note="Description of Artificial Sequence: Synthetic oligonucleotide"
  source: /note="Sense strand starting at position 2025 of SEQ ID NO: 2110"
ucgucugcuuuauauagga

SEQ ID NO: 2878 - RNA, 19 nt, Artificial Sequence
  source: /note="Description of Artificial Sequence: Synthetic oligonucleotide"
  source: /note="Antisense strand to SEQ ID NO: 2877"
uccuauauaaagcagacga

SEQ ID NO: 2879 - RNA, 19 nt, Artificial Sequence
  source: /note="Description of Artificial Sequence: Synthetic oligonucleotide"
  source: /note="Sense strand starting at position 2025 of SEQ ID NO: 2170"
ggagcugauuauuaugaag

SEQ ID NO: 2880 - RNA, 19 nt, Artificial Sequence
  source: /note="Description of Artificial Sequence: Synthetic oligonucleotide"
  source: /note="Antisense strand to SEQ ID NO: 2879"
cuucauaauaaucagcucc

SEQ ID NO: 2881 - RNA, 19 nt, Artificial Sequence
  source: /note="Description of Artificial Sequence: Synthetic oligonucleotide"
  source: /note="Sense strand starting at position 2025 of SEQ ID NO: 2172"
agcugauuauuaugaagac

SEQ ID NO: 2882 - RNA, 19 nt, Artificial Sequence
  source: /note="Description of Artificial Sequence: Synthetic oligonucleotide"
  source: /note="Antisense strand to SEQ ID NO: 2881"
gucuucauaauaaucagcu

SEQ ID NO: 2883 - RNA, 19 nt, Artificial Sequence
  source: /note="Description of Artificial Sequence: Synthetic oligonucleotide"
  source: /note="Sense strand starting at position 2025 of SEQ ID NO: 2173"
gcugauuauuaugaagaca

SEQ ID NO: 2884 - RNA, 19 nt, Artificial Sequence
  source: /note="Description of Artificial Sequence: Synthetic oligonucleotide"
  source: /note="Antisense strand to SEQ ID NO: 2883"
ugucuucauaauaaucagc

SEQ ID NO: 2885 - RNA, 19 nt, Artificial Sequence
  source: /note="Description of Artificial Sequence: Synthetic oligonucleotide"
  source: /note="Sense strand starting at position 2025 of SEQ ID NO: 2239"
uaugcaaacugguguuagu

SEQ ID NO: 2886 - RNA, 19 nt, Artificial Sequence
  source: /note="Description of Artificial Sequence: Synthetic oligonucleotide"
  source: /note="Antisense strand to SEQ ID NO: 2885"
acuaacaccaguuugcaua

SEQ ID NO: 2887 - RNA, 19 nt, Artificial Sequence
  source: /note="Description of Artificial Sequence: Synthetic oligonucleotide"
  source: /note="Sense strand starting at position 2025 of SEQ ID NO: 2242"
gcaaacugguguuagugaa

SEQ ID NO: 2888 - RNA, 19 nt, Artificial Sequence
  source: /note="Description of Artificial Sequence: Synthetic oligonucleotide"
  source: /note="Antisense strand to SEQ ID NO: 2887"
uucacuaacaccaguuugc

SEQ ID NO: 2889 - RNA, 19 nt, Artificial Sequence
  source: /note="Description of Artificial Sequence: Synthetic oligonucleotide"
  source: /note="Sense strand starting at position 2025 of SEQ ID NO: 2323"
gugugaugcuaggagaaga

SEQ ID NO: 2890 - RNA, 19 nt, Artificial Sequence
  source: /note="Description of Artificial Sequence: Synthetic oligonucleotide"
  source: /note="Antisense strand to SEQ ID NO: 2889"
ucuucuccuagcaucacac

SEQ ID NO: 2891 - RNA, 19 nt, Artificial Sequence
  source: /note="Description of Artificial Sequence: Synthetic oligonucleotide"
  source: /note="Sense strand starting at position 2025 of SEQ ID NO: 2502"
guuaauucuuaaggcaaau

SEQ ID NO: 2892 - RNA, 19 nt, Artificial Sequence
  source: /note="Description of Artificial Sequence: Synthetic oligonucleotide"
  source: /note="Antisense strand to SEQ ID NO: 2891"
auuugccuuaagaauuaac

SEQ ID NO: 2893 - RNA, 19 nt, Artificial Sequence
  source: /note="Description of Artificial Sequence: Synthetic oligonucleotide"
  source: /note="Sense strand starting at position 2025 of SEQ ID NO: 2648"
acagaauugugucaggcuu

SEQ ID NO: 2894 - RNA, 19 nt, Artificial Sequence
  source: /note="Description of Artificial Sequence: Synthetic oligonucleotide"
  source: /note="Antisense strand to SEQ ID NO: 2893"
aagccugacacaauucugu

SEQ ID NO: 2895 - RNA, 19 nt, Artificial Sequence
  source: /note="Description of Artificial Sequence: Synthetic oligonucleotide"
  source: /note="Sense strand starting at position 2025 of SEQ ID NO: 2650"
agaauugugucaggcuucu

SEQ ID NO: 2896 - RNA, 19 nt, Artificial Sequence
  source: /note="Description of Artificial Sequence: Synthetic oligonucleotide"
  source: /note="Antisense strand to SEQ ID NO: 2895"
agaagccugacacaauucu

SEQ ID NO: 2897 - RNA, 19 nt, Artificial Sequence
  source: /note="Description of Artificial Sequence: Synthetic oligonucleotide"
  source: /note="Sense strand starting at position 2025 of SEQ ID NO: 2656"
gugucaggcuucuguaaug

SEQ ID NO: 2898 - RNA, 19 nt, Artificial Sequence
  source: /note="Description of Artificial Sequence: Synthetic oligonucleotide"
  source: /note="Antisense strand to SEQ ID NO: 2897"
cauuacagaagccugacac

SEQ ID NO: 2899 - RNA, 19 nt, Artificial Sequence
  source: /note="Description of Artificial Sequence: Synthetic oligonucleotide"
  source: /note="Sense strand starting at position 2025 of SEQ ID NO: 3159"
ccgugcuggcaguaaguua

SEQ ID NO: 2900 - RNA, 19 nt, Artificial Sequence
  source: /note="Description of Artificial Sequence: Synthetic oligonucleotide"
  source: /note="Antisense strand to SEQ ID NO: 2899"
uaacuuacugccagcacgg

SEQ ID NO: 2901 - RNA, 19 nt, Artificial Sequence
  source: /note="Description of Artificial Sequence: Synthetic oligonucleotide"
  source: /note="Sense strand starting at position 2025 of SEQ ID NO: 3252"
aggagguguuggugggaaa

SEQ ID NO: 2902 - RNA, 19 nt, Artificial Sequence
  source: /note="Description of Artificial Sequence: Synthetic oligonucleotide"
  source: /note="Antisense strand to SEQ ID NO: 2901"
uuucccaccaacaccuccu

SEQ ID NO: 2903 - RNA, 19 nt, Artificial Sequence
  source: /note="Description of Artificial Sequence: Synthetic oligonucleotide"
  source: /note="Sense strand starting at position 2025 of SEQ ID NO: 3273"
ucucauuaaucguaccgua

SEQ ID NO: 2904 - RNA, 19 nt, Artificial Sequence
  source: /note="Description of Artificial Sequence: Synthetic oligonucleotide"
  source: /note="Antisense strand to SEQ ID NO: 2903"
uacgguacgauuaaugaga

SEQ ID NO: 2905 - RNA, 19 nt, Artificial Sequence
  source: /note="Description of Artificial Sequence: Synthetic oligonucleotide"
  source: /note="Sense strand starting at position 2025 of SEQ ID NO: 3276"
cauuaaucguaccguauuc

SEQ ID NO: 2906 - RNA, 19 nt, Artificial Sequence
  source: /note="Description of Artificial Sequence: Synthetic oligonucleotide"
  source: /note="Antisense strand to SEQ ID NO: 2905"
gaauacgguacgauuaaug

SEQ ID NO: 2907 - RNA, 19 nt, Artificial Sequence
  source: /note="Description of Artificial Sequence: Synthetic oligonucleotide"
  source: /note="Sense strand starting at position 2025 of SEQ ID NO: 3286"
accguauucccuugucuac

SEQ ID NO: 2908 - RNA, 19 nt, Artificial Sequence
  source: /note="Description of Artificial Sequence: Synthetic oligonucleotide"
  source: /note="Antisense strand to SEQ ID NO: 2907"
guagacaagggaauacggu

SEQ ID NO: 2909 - RNA, 19 nt, Artificial Sequence
  source: /note="Description of Artificial Sequence: Synthetic oligonucleotide"
  source: /note="Sense strand starting at position 2025 of SEQ ID NO: 3337"
aaagaaaccuuguagcaug

SEQ ID NO: 2910 - RNA, 19 nt, Artificial Sequence
  source: /note="Description of Artificial Sequence: Synthetic oligonucleotide"
  source: /note="Antisense strand to SEQ ID NO: 2909"
caugcuacaagguuucuuu

SEQ ID NO: 2911 - RNA, 19 nt, Artificial Sequence
  source: /note="Description of Artificial Sequence: Synthetic oligonucleotide"
  source: /note="Sense strand starting at position 2025 of SEQ ID NO: 3340"
gaaaccuuguagcaugagu

SEQ ID NO: 2912 - RNA, 19 nt, Artificial Sequence
  source: /note="Description of Artificial Sequence: Synthetic oligonucleotide"
  source: /note="Antisense strand to SEQ ID NO: 2911"
acucaugcuacaagguuuc

SEQ ID NO: 2913 - RNA, 19 nt, Artificial Sequence
  source: /note="Description of Artificial Sequence: Synthetic oligonucleotide"
  source: /note="Sense strand starting at position 2025 of SEQ ID NO: 3432"
ucguacugcuuagaaagau

SEQ ID NO: 2914 - RNA, 19 nt, Artificial Sequence
  source: /note="Description of Artificial Sequence: Synthetic oligonucleotide"
  source: /note="Antisense strand to SEQ ID NO: 2913"
aucuuucuaagcaguacga

SEQ ID NO: 2915 - RNA, 19 nt, Artificial Sequence
  source: /note="Description of Artificial Sequence: Synthetic oligonucleotide"
  source: /note="Sense strand starting at position 2025 of SEQ ID NO: 3446"
aagauuaguugaggguauu

SEQ ID NO: 2916 - RNA, 19 nt, Artificial Sequence
  source: /note="Description of Artificial Sequence: Synthetic oligonucleotide"
  source: /note="Antisense strand to SEQ ID NO: 2915"
aauacccucaacuaaucuu

SEQ ID NO: 2917 - RNA, 19 nt, Artificial Sequence
  source: /note="Description of Artificial Sequence: Synthetic oligonucleotide"
  source: /note="Sense strand starting at position 2025 of SEQ ID NO: 3458"
ggguauuucuucuguggua

SEQ ID NO: 2918 - RNA, 19 nt, Artificial Sequence
  source: /note="Description of Artificial Sequence: Synthetic oligonucleotide"
  source: /note="Antisense strand to SEQ ID NO: 2917"
uaccacagaagaaauaccc

SEQ ID NO: 2919 - RNA, 19 nt, Artificial Sequence
  source: /note="Description of Artificial Sequence: Synthetic oligonucleotide"
  source: /note="Sense strand starting at position 2025 of SEQ ID NO: 3463"
uuucuucugugguauuacu

SEQ ID NO: 2920 - RNA, 19 nt, Artificial Sequence
  source: /note="Description of Artificial Sequence: Synthetic oligonucleotide"
  source: /note="Antisense strand to SEQ ID NO: 2919"
aguaauaccacagaagaaa

SEQ ID NO: 2921 - RNA, 19 nt, Artificial Sequence
  source: /note="Description of Artificial Sequence: Synthetic oligonucleotide"
  source: /note="Sense strand starting at position 2025 of SEQ ID NO: 3471"
gugguauuacuuuaggcgu

SEQ ID NO: 2922 - RNA, 19 nt, Artificial Sequence
  source: /note="Description of Artificial Sequence: Synthetic oligonucleotide"
  source: /note="Antisense strand to SEQ ID NO: 2921"
acgccuaaaguaauaccac

SEQ ID NO: 2923 - RNA, 19 nt, Artificial Sequence
  source: /note="Description of Artificial Sequence: Synthetic oligonucleotide"
  source: /note="Sense strand starting at position 2025 of SEQ ID NO: 3473"
gguauuacuuuaggcguuu

SEQ ID NO: 2924 - RNA, 19 nt, Artificial Sequence
  source: /note="Description of Artificial Sequence: Synthetic oligonucleotide"
  source: /note="Antisense strand to SEQ ID NO: 2923"
aaacgccuaaaguaauacc

SEQ ID NO: 2925 - RNA, 19 nt, Artificial Sequence
  source: /note="Description of Artificial Sequence: Synthetic oligonucleotide"
  source: /note="Sense strand starting at position 2025 of SEQ ID NO: 3638"
gggccaaaguuagagaaau

SEQ ID NO: 2926 - RNA, 19 nt, Artificial Sequence
  source: /note="Description of Artificial Sequence: Synthetic oligonucleotide"
  source: /note="Antisense strand to SEQ ID NO: 2925"
auuucucuaacuuuggccc

SEQ ID NO: 2927 - RNA, 19 nt, Artificial Sequence
  source: /note="Description of Artificial Sequence: Synthetic oligonucleotide"
  source: /note="Sense strand starting at position 2025 of SEQ ID NO: 3666"
aguaguuaauugcagaagu

SEQ ID NO: 2928 - RNA, 19 nt, Artificial Sequence
  source: /note="Description of Artificial Sequence: Synthetic oligonucleotide"
  source: /note="Antisense strand to SEQ ID NO: 2927"
acuucugcaauuaacuacu

SEQ ID NO: 2929 - RNA, 19 nt, Artificial Sequence
  source: /note="Description of Artificial Sequence: Synthetic oligonucleotide"
  source: /note="Sense strand starting at position 2025 of SEQ ID NO: 3734"
gaaauuagcucuuggccag

SEQ ID NO: 2930 - RNA, 19 nt, Artificial Sequence
  source: /note="Description of Artificial Sequence: Synthetic oligonucleotide"
  source: /note="Antisense strand to SEQ ID NO: 2929"
cuggccaagagcuaauuuc

SEQ ID NO: 2931 - RNA, 19 nt, Artificial Sequence
  source: /note="Description of Artificial Sequence: Synthetic oligonucleotide"
  source: /note="Sense strand starting at position 2025 of SEQ ID NO: 3816"
gcaguacugucugaugaag

SEQ ID NO: 2932 - RNA, 19 nt, Artificial Sequence
  source: /note="Description of Artificial Sequence: Synthetic oligonucleotide"
  source: /note="Antisense strand to SEQ ID NO: 2931"
cuucaucagacaguacugc

SEQ ID NO: 2933 - RNA, 19 nt, Artificial Sequence
  source: /note="Description of Artificial Sequence: Synthetic oligonucleotide"
  source: /note="Sense strand starting at position 2025 of SEQ ID NO: 3896"
aggauugcuuucugaucau

SEQ ID NO: 2934 - RNA, 19 nt, Artificial Sequence
  source: /note="Description of Artificial Sequence: Synthetic oligonucleotide"
  source: /note="Antisense strand to SEQ ID NO: 2933"
augaucagaaagcaauccu

SEQ ID NO: 2935 - RNA, 19 nt, Artificial Sequence
  source: /note="Description of Artificial Sequence: Synthetic oligonucleotide"
  source: /note="Sense strand starting at position 2025 of SEQ ID NO: 3936"
cuuggcaucugggaacauu

SEQ ID NO: 2936 - RNA, 19 nt, Artificial Sequence
  source: /note="Description of Artificial Sequence: Synthetic oligonucleotide"
  source: /note="Antisense strand to SEQ ID NO: 2935"
aauguucccagaugccaag

SEQ ID NO: 2937 - RNA, 19 nt, Artificial Sequence
  source: /note="Description of Artificial Sequence: Synthetic oligonucleotide"
  source: /note="Sense strand starting at position 2024 of SEQ ID NO: 51"
guagcaguauguugucaaa

SEQ ID NO: 2938 - RNA, 19 nt, Artificial Sequence
  source: /note="Description of Artificial Sequence: Synthetic oligonucleotide"
  source: /note="Antisense strand to SEQ ID NO: 2937"
uuugacaacauacugcuac

SEQ ID NO: 2939 - RNA, 19 nt, Artificial Sequence
  source: /note="Description of Artificial Sequence: Synthetic oligonucleotide"
  source: /note="Sense strand starting at position 2024 of SEQ ID NO: 54"
gcaguauguugucaaacag

SEQ ID NO: 2940 - RNA, 19 nt, Artificial Sequence
  source: /note="Description of Artificial Sequence: Synthetic oligonucleotide"
  source: /note="Antisense strand to SEQ ID NO: 2939"
cuguuugacaacauacugc

SEQ ID NO: 2941 - RNA, 19 nt, Artificial Sequence
  source: /note="Description of Artificial Sequence: Synthetic oligonucleotide"
  source: /note="Sense strand starting at position 2024 of SEQ ID NO: 216"
uucuucgcauucuaagaau

SEQ ID NO: 2942 - RNA, 19 nt, Artificial Sequence
  source: /note="Description of Artificial Sequence: Synthetic oligonucleotide"
  source: /note="Antisense strand to SEQ ID NO: 2941"
auucuuagaaugcgaagaa

SEQ ID NO: 2943 - RNA, 19 nt, Artificial Sequence
  source: /note="Description of Artificial Sequence: Synthetic oligonucleotide"
  source: /note="Sense strand starting at position 2024 of SEQ ID NO: 219"
uucgcauucuaagaauuga

SEQ ID NO: 2944 - RNA, 19 nt, Artificial Sequence
  source: /note="Description of Artificial Sequence: Synthetic oligonucleotide"
  source: /note="Antisense strand to SEQ ID NO: 2943"
ucaauucuuagaaugcgaa

SEQ ID NO: 2945 - RNA, 19 nt, Artificial Sequence
  source: /note="Description of Artificial Sequence: Synthetic oligonucleotide"
  source: /note="Sense strand starting at position 2024 of SEQ ID NO: 443"
guguguauauugcaaacaa

SEQ ID NO: 2946 - RNA, 19 nt, Artificial Sequence
  source: /note="Description of Artificial Sequence: Synthetic oligonucleotide"
  source: /note="Antisense strand to SEQ ID NO: 2945"
uuguuugcaauauacacac

SEQ ID NO: 2947 - RNA, 19 nt, Artificial Sequence
  source: /note="Description of Artificial Sequence: Synthetic oligonucleotide"
  source: /note="Sense strand starting at position 2024 of SEQ ID NO: 461"
acagauauaugccaugcau

SEQ ID NO: 2948 - RNA, 19 nt, Artificial Sequence
  source: /note="Description of Artificial Sequence: Synthetic oligonucleotide"
  source: /note="Antisense strand to SEQ ID NO: 2947"
augcauggcauauaucugu

SEQ ID NO: 2949 - RNA, 19 nt, Artificial Sequence
  source: /note="Description of Artificial Sequence: Synthetic oligonucleotide"
  source: /note="Sense strand starting at position 2024 of SEQ ID NO: 585"
auuauaaagucugguagcu

SEQ ID NO: 2950 - RNA, 19 nt, Artificial Sequence
  source: /note="Description of Artificial Sequence: Synthetic oligonucleotide"
  source: /note="Antisense strand to SEQ ID NO: 2949"
agcuaccagacuuuauaau

SEQ ID NO: 2951 - RNA, 19 nt, Artificial Sequence
  source: /note="Description of Artificial Sequence: Synthetic oligonucleotide"
  source: /note="Sense strand starting at position 2024 of SEQ ID NO: 587"
uauaaagucugguagcuuu

SEQ ID NO: 2952 - RNA, 19 nt, Artificial Sequence
  source: /note="Description of Artificial Sequence: Synthetic oligonucleotide"
  source: /note="Antisense strand to SEQ ID NO: 2951"
aaagcuaccagacuuuaua

SEQ ID NO: 2953 - RNA, 19 nt, Artificial Sequence
  source: /note="Description of Artificial Sequence: Synthetic oligonucleotide"
  source: /note="Sense strand starting at position 2024 of SEQ ID NO: 682"
uuuaguaguuguggagcau

SEQ ID NO: 2954 - RNA, 19 nt, Artificial Sequence
  source: /note="Description of Artificial Sequence: Synthetic oligonucleotide"
  source: /note="Antisense strand to SEQ ID NO: 2953"
augcuccacaacuacuaaa

SEQ ID NO: 2955 - RNA, 19 nt, Artificial Sequence
  source: /note="Description of Artificial Sequence: Synthetic oligonucleotide"
  source: /note="Sense strand starting at position 2024 of SEQ ID NO: 813"
cccaucucuucgggacaca

SEQ ID NO: 2956 - RNA, 19 nt, Artificial Sequence
  source: /note="Description of Artificial Sequence: Synthetic oligonucleotide"
  source: /note="Antisense strand to SEQ ID NO: 2955"
ugugucccgaagagauggg

SEQ ID NO: 2957 - RNA, 19 nt, Artificial Sequence
  source: /note="Description of Artificial Sequence: Synthetic oligonucleotide"
  source: /note="Sense strand starting at position 2024 of SEQ ID NO: 971"
gcuggcucauaauagacau

SEQ ID NO: 2958 - RNA, 19 nt, Artificial Sequence
  source: /note="Description of Artificial Sequence: Synthetic oligonucleotide"
  source: /note="Antisense strand to SEQ ID NO: 2957"
augucuauuaugagccagc

SEQ ID NO: 2959 - RNA, 19 nt, Artificial Sequence
  source: /note="Description of Artificial Sequence: Synthetic oligonucleotide"
  source: /note="Sense strand starting at position 2024 of SEQ ID NO: 999"
aggugacuuuacuacuaaa

SEQ ID NO: 2960 - RNA, 19 nt, Artificial Sequence
  source: /note="Description of Artificial Sequence: Synthetic oligonucleotide"
  source: /note="Antisense strand to SEQ ID NO: 2959"
uuuaguaguaaagucaccu

SEQ ID NO: 2961 - RNA, 19 nt, Artificial Sequence
  source: /note="Description of Artificial Sequence: Synthetic oligonucleotide"
  source: /note="Sense strand starting at position 2024 of SEQ ID NO: 1242"
caugaugugucagagaaac

SEQ ID NO: 2962 - RNA, 19 nt, Artificial Sequence
  source: /note="Description of Artificial Sequence: Synthetic oligonucleotide"
  source: /note="Antisense strand to SEQ ID NO: 2961"
guuucucugacacaucaug

SEQ ID NO: 2963 - RNA, 19 nt, Artificial Sequence
  source: /note="Description of Artificial Sequence: Synthetic oligonucleotide"
  source: /note="Sense strand starting at position 2024 of SEQ ID NO: 1281"
ccauguaguuccuauacag

SEQ ID NO: 2964 - RNA, 19 nt, Artificial Sequence
  source: /note="Description of Artificial Sequence: Synthetic oligonucleotide"
  source: /note="Antisense strand to SEQ ID NO: 2963"
cuguauaggaacuacaugg

SEQ ID NO: 2965 - RNA, 19 nt, Artificial Sequence
  source: /note="Description of Artificial Sequence: Synthetic oligonucleotide"
  source: /note="Sense strand starting at position 2024 of SEQ ID NO: 1314"
gagaauauaugucagguca

SEQ ID NO: 2966 - RNA, 19 nt, Artificial Sequence
  source: /note="Description of Artificial Sequence: Synthetic oligonucleotide"
  source: /note="Antisense strand to SEQ ID NO: 2965"
ugaccugacauauauucuc

SEQ ID NO: 2967 - RNA, 19 nt, Artificial Sequence
  source: /note="Description of Artificial Sequence: Synthetic oligonucleotide"
  source: /note="Sense strand starting at position 2024 of SEQ ID NO: 1316"
gaauauaugucaggucagu

SEQ ID NO: 2968 - RNA, 19 nt, Artificial Sequence
  source: /note="Description of Artificial Sequence: Synthetic oligonucleotide"
  source: /note="Antisense strand to SEQ ID NO: 2967"
acugaccugacauauauuc

SEQ ID NO: 2969 - RNA, 19 nt, Artificial Sequence
  source: /note="Description of Artificial Sequence: Synthetic oligonucleotide"
  source: /note="Sense strand starting at position 2024 of SEQ ID NO: 1350"
guuacuaaauacggaagua

SEQ ID NO: 2970 - RNA, 19 nt, Artificial Sequence
  source: /note="Description of Artificial Sequence: Synthetic oligonucleotide"
  source: /note="Antisense strand to SEQ ID NO: 2969"
uacuuccguauuuaguaac

SEQ ID NO: 2971 - RNA, 19 nt, Artificial Sequence
  source: /note="Description of Artificial Sequence: Synthetic oligonucleotide"
  source: /note="Sense strand starting at position 2024 of SEQ ID NO: 1463"
acugcagugguuuguuaau

SEQ ID NO: 2972 - RNA, 19 nt, Artificial Sequence
  source: /note="Description of Artificial Sequence: Synthetic oligonucleotide"
  source: /note="Antisense strand to SEQ ID NO: 2971"
auuaacaaaccacugcagu

SEQ ID NO: 2973 - RNA, 19 nt, Artificial Sequence
  source: /note="Description of Artificial Sequence: Synthetic oligonucleotide"
  source: /note="Sense strand starting at position 2024 of SEQ ID NO: 1465"
ugcagugguuuguuaauca

SEQ ID NO: 2974 - RNA, 19 nt, Artificial Sequence
  source: /note="Description of Artificial Sequence: Synthetic oligonucleotide"
  source: /note="Antisense strand to SEQ ID NO: 2973"
ugauuaacaaaccacugca

SEQ ID NO: 2975 - RNA, 19 nt, Artificial Sequence
  source: /note="Description of Artificial Sequence: Synthetic oligonucleotide"
  source: /note="Sense strand starting at position 2024 of SEQ ID NO: 1492"
uguguuuaguucuaucgca

SEQ ID NO: 2976 - RNA, 19 nt, Artificial Sequence
  source: /note="Description of Artificial Sequence: Synthetic oligonucleotide"
  source: /note="Antisense strand to SEQ ID NO: 2975"
ugcgauagaacuaaacaca

SEQ ID NO: 2977 - RNA, 19 nt, Artificial Sequence
  source: /note="Description of Artificial Sequence: Synthetic oligonucleotide"
  source: /note="Sense strand starting at position 2024 of SEQ ID NO: 1497"
uuaguucuaucgcaaagaa

SEQ ID NO: 2978 - RNA, 19 nt, Artificial Sequence
  source: /note="Description of Artificial Sequence: Synthetic oligonucleotide"
  source: /note="Antisense strand to SEQ ID NO: 2977"
uucuuugcgauagaacuaa

SEQ ID NO: 2979 - RNA, 19 nt, Artificial Sequence
  source: /note="Description of Artificial Sequence: Synthetic oligonucleotide"
  source: /note="Sense strand starting at position 2024 of SEQ ID NO: 1618"
uuugcaaacuacugugaua

SEQ ID NO: 2980 - RNA, 19 nt, Artificial Sequence
  source: /note="Description of Artificial Sequence: Synthetic oligonucleotide"
  source: /note="Antisense strand to SEQ ID NO: 2979"
uaucacaguaguuugcaaa

SEQ ID NO: 2981 - RNA, 19 nt, Artificial Sequence
  source: /note="Description of Artificial Sequence: Synthetic oligonucleotide"
  source: /note="Sense strand starting at position 2024 of SEQ ID NO: 1621"
gcaaacuacugugauaauu

SEQ ID NO: 2982 - RNA, 19 nt, Artificial Sequence
  source: /note="Description of Artificial Sequence: Synthetic oligonucleotide"
  source: /note="Antisense strand to SEQ ID NO: 2981"
aauuaucacaguaguuugc

SEQ ID NO: 2983 - RNA, 19 nt, Artificial Sequence
  source: /note="Description of Artificial Sequence: Synthetic oligonucleotide"
  source: /note="Sense strand starting at position 2024 of SEQ ID NO: 1650"
cuaccuaauuagugagcuu

SEQ ID NO: 2984 - RNA, 19 nt, Artificial Sequence
  source: /note="Description of Artificial Sequence: Synthetic oligonucleotide"
  source: /note="Antisense strand to SEQ ID NO: 2983"
aagcucacuaauuagguag

SEQ ID NO: 2985 - RNA, 19 nt, Artificial Sequence
  source: /note="Description of Artificial Sequence: Synthetic oligonucleotide"
  source: /note="Sense strand starting at position 2024 of SEQ ID NO: 1661"
gugagcuugucacaaacua

SEQ ID NO: 2986 - RNA, 19 nt, Artificial Sequence
  source: /note="Description of Artificial Sequence: Synthetic oligonucleotide"
  source: /note="Antisense strand to SEQ ID NO: 2985"
uaguuugugacaagcucac

SEQ ID NO: 2987 - RNA, 19 nt, Artificial Sequence
  source: /note="Description of Artificial Sequence: Synthetic oligonucleotide"
  source: /note="Sense strand starting at position 2024 of SEQ ID NO: 1915"
guaauugccucccagaucu

SEQ ID NO: 2988 - RNA, 19 nt, Artificial Sequence
  source: /note="Description of Artificial Sequence: Synthetic oligonucleotide"
  source: /note="Antisense strand to SEQ ID NO: 2987"
agaucugggaggcaauuac

SEQ ID NO: 2989 - RNA, 19 nt, Artificial Sequence
  source: /note="Description of Artificial Sequence: Synthetic oligonucleotide"
  source: /note="Sense strand starting at position 2024 of SEQ ID NO: 1984"
aguaacugaugccaggauu

SEQ ID NO: 2990 - RNA, 19 nt, Artificial Sequence
  source: /note="Description of Artificial Sequence: Synthetic oligonucleotide"
  source: /note="Antisense strand to SEQ ID NO: 2989"
aauccuggcaucaguuacu

SEQ ID NO: 2991 - RNA, 19 nt, Artificial Sequence
  source: /note="Description of Artificial Sequence: Synthetic oligonucleotide"
  source: /note="Sense strand starting at position 2024 of SEQ ID NO: 2160"
ucaacuguguucugauuaa

SEQ ID NO: 2992 - RNA, 19 nt, Artificial Sequence
  source: /note="Description of Artificial Sequence: Synthetic oligonucleotide"
  source: /note="Antisense strand to SEQ ID NO: 2991"
uuaaucagaacacaguuga

SEQ ID NO: 2993 - RNA, 19 nt, Artificial Sequence
  source: /note="Description of Artificial Sequence: Synthetic oligonucleotide"
  source: /note="Sense strand starting at position 2024 of SEQ ID NO: 2405"
ccaugcauuuguuauguau

SEQ ID NO: 2994 - RNA, 19 nt, Artificial Sequence
  source: /note="Description of Artificial Sequence: Synthetic oligonucleotide"
  source: /note="Antisense strand to SEQ ID NO: 2993"
auacauaacaaaugcaugg

SEQ ID NO: 2995 - RNA, 19 nt, Artificial Sequence
  source: /note="Description of Artificial Sequence: Synthetic oligonucleotide"
  source: /note="Sense strand starting at position 2024 of SEQ ID NO: 2423"
uccacugucuaccaaaguu

SEQ ID NO: 2996 - RNA, 19 nt, Artificial Sequence
  source: /note="Description of Artificial Sequence: Synthetic oligonucleotide"
  source: /note="Antisense strand to SEQ ID NO: 2995"
aacuuugguagacagugga

SEQ ID NO: 2997 - RNA, 19 nt, Artificial Sequence
  source: /note="Description of Artificial Sequence: Synthetic oligonucleotide"
  source: /note="Sense strand starting at position 2024 of SEQ ID NO: 2476"
uauugaugaugccaacagu

SEQ ID NO: 2998 - RNA, 19 nt, Artificial Sequence
  source: /note="Description of Artificial Sequence: Synthetic oligonucleotide"
  source: /note="Antisense strand to SEQ ID NO: 2997"
acuguuggcaucaucaaua

SEQ ID NO: 2999 - RNA, 19 nt, Artificial Sequence
  source: /note="Description of Artificial Sequence: Synthetic oligonucleotide"
  source: /note="Sense strand starting at position 2024 of SEQ ID NO: 2485"
ugccaacagucugaauaag

SEQ ID NO: 3000 - RNA, 19 nt, Artificial Sequence
  source: /note="Description of Artificial Sequence: Synthetic oligonucleotide"
  source: /note="Antisense strand to SEQ ID NO: 2999"
cuuauucagacuguuggca

SEQ ID NO: 3001 - RNA, 19 nt, Artificial Sequence
  source: /note="Description of Artificial Sequence: Synthetic oligonucleotide"
  source: /note="Sense strand starting at position 2024 of SEQ ID NO: 2554"
guguauaggucucauggga

SEQ ID NO: 3002 - RNA, 19 nt, Artificial Sequence
  source: /note="Description of Artificial Sequence: Synthetic oligonucleotide"
  source: /note="Antisense strand to SEQ ID NO: 3001"
ucccaugagaccuauacac

SEQ ID NO: 3003 - RNA, 19 nt, Artificial Sequence
  source: /note="Description of Artificial Sequence: Synthetic oligonucleotide"
  source: /note="Sense strand starting at position 2024 of SEQ ID NO: 2644"
aguugugaauuaugcuaaa

SEQ ID NO: 3004 - RNA, 19 nt, Artificial Sequence
  source: /note="Description of Artificial Sequence: Synthetic oligonucleotide"
  source: /note="Antisense strand to SEQ ID NO: 3003"
uuuagcauaauucacaacu

SEQ ID NO: 3005 - RNA, 19 nt, Artificial Sequence
  source: /note="Description of Artificial Sequence: Synthetic oligonucleotide"
  source: /note="Sense strand starting at position 2024 of SEQ ID NO: 2692"
ccauuucucuggugccaau

SEQ ID NO: 3006 - RNA, 19 nt, Artificial Sequence
  source: /note="Description of Artificial Sequence: Synthetic oligonucleotide"
  source: /note="Antisense strand to SEQ ID NO: 3005"
auuggcaccagagaaaugg

SEQ ID NO: 3007 - RNA, 19 nt, Artificial Sequence
  source: /note="Description of Artificial Sequence: Synthetic oligonucleotide"
  source: /note="Sense strand starting at position 2024 of SEQ ID NO: 2751"
uuuaaugguucugaauaga

SEQ ID NO: 3008 - RNA, 19 nt, Artificial Sequence
  source: /note="Description of Artificial Sequence: Synthetic oligonucleotide"
  source: /note="Antisense strand to SEQ ID NO: 3007"
ucuauucagaaccauuaaa

SEQ ID NO: 3009 - RNA, 19 nt, Artificial Sequence
  source: /note="Description of Artificial Sequence: Synthetic oligonucleotide"
  source: /note="Sense strand starting at position 2024 of SEQ ID NO: 2790"
ugaauacaguuguauuaug

SEQ ID NO: 3010 - RNA, 19 nt, Artificial Sequence
  source: /note="Description of Artificial Sequence: Synthetic oligonucleotide"
  source: /note="Antisense strand to SEQ ID NO: 3009"
cauaauacaacuguauuca

SEQ ID NO: 3011 - RNA, 19 nt, Artificial Sequence
  source: /note="Description of Artificial Sequence: Synthetic oligonucleotide"
  source: /note="Sense strand starting at position 2024 of SEQ ID NO: 3049"
ugcaaugaguaauagauaa

SEQ ID NO: 3012 - RNA, 19 nt, Artificial Sequence
  source: /note="Description of Artificial Sequence: Synthetic oligonucleotide"
  source: /note="Antisense strand to SEQ ID NO: 3011"
uuaucuauuacucauugca

SEQ ID NO: 3013 - RNA, 19 nt, Artificial Sequence
  source: /note="Description of Artificial Sequence: Synthetic oligonucleotide"
  source: /note="Sense strand starting at position 2024 of SEQ ID NO: 3084"
gagucagacugugauguuu

SEQ ID NO: 3014 - RNA, 19 nt, Artificial Sequence
  source: /note="Description of Artificial Sequence: Synthetic oligonucleotide"
  source: /note="Antisense strand to SEQ ID NO: 3013"
aaacaucacagucugacuc

SEQ ID NO: 3015 - RNA, 19 nt, Artificial Sequence
  source: /note="Description of Artificial Sequence: Synthetic oligonucleotide"
  source: /note="Sense strand starting at position 2024 of SEQ ID NO: 3086"
gucagacugugauguuuac

SEQ ID NO: 3016 - RNA, 19 nt, Artificial Sequence
  source: /note="Description of Artificial Sequence: Synthetic oligonucleotide"
  source: /note="Antisense strand to SEQ ID NO: 3015"
guaaacaucacagucugac

SEQ ID NO: 3017 - RNA, 19 nt, Artificial Sequence
  source: /note="Description of Artificial Sequence: Synthetic oligonucleotide"
  source: /note="Sense strand starting at position 2024 of SEQ ID NO: 3245"
cucucagugugguugucua

SEQ ID NO: 3018 - RNA, 19 nt, Artificial Sequence
  source: /note="Description of Artificial Sequence: Synthetic oligonucleotide"
  source: /note="Antisense strand to SEQ ID NO: 3017"
uagacaaccacacugagag

SEQ ID NO: 3019 - RNA, 19 nt, Artificial Sequence
  source: /note="Description of Artificial Sequence: Synthetic oligonucleotide"
  source: /note="Sense strand starting at position 2024 of SEQ ID NO: 3334"
ggcucuaagucugcauguu

SEQ ID NO: 3020 - RNA, 19 nt, Artificial Sequence
  source: /note="Description of Artificial Sequence: Synthetic oligonucleotide"
  source: /note="Antisense strand to SEQ ID NO: 3019"
aacaugcagacuuagagcc

SEQ ID NO: 3021 - RNA, 19 nt, Artificial Sequence
  source: /note="Description of Artificial Sequence: Synthetic oligonucleotide"
  source: /note="Sense strand starting at position 2024 of SEQ ID NO: 3343"
ucugcauguuagcaucagu

SEQ ID NO: 3022 - RNA, 19 nt, Artificial Sequence
  source: /note="Description of Artificial Sequence: Synthetic oligonucleotide"
  source: /note="Antisense strand to SEQ ID NO: 3021"
acugaugcuaacaugcaga

SEQ ID NO: 3023 - RNA, 19 nt, Artificial Sequence
  source: /note="Description of Artificial Sequence: Synthetic oligonucleotide"
  source: /note="Sense strand starting at position 2024 of SEQ ID NO: 3354"
gcaucagugucccucuaug

SEQ ID NO: 3024 - RNA, 19 nt, Artificial Sequence
  source: /note="Description of Artificial Sequence: Synthetic oligonucleotide"
  source: /note="Antisense strand to SEQ ID NO: 3023"
cauagagggacacugaugc

SEQ ID NO: 3025 - RNA, 19 nt, Artificial Sequence
  source: /note="Description of Artificial Sequence: Synthetic oligonucleotide"
  source: /note="Sense strand starting at position 2024 of SEQ ID NO: 3395"
gaguauaagugcccuuugu

SEQ ID NO: 3026 - RNA, 19 nt, Artificial Sequence
  source: /note="Description of Artificial Sequence: Synthetic oligonucleotide"
  source: /note="Antisense strand to SEQ ID NO: 3025"
acaaagggcacuuauacuc

SEQ ID NO: 3027 - RNA, 19 nt, Artificial Sequence
  source: /note="Description of Artificial Sequence: Synthetic oligonucleotide"
  source: /note="Sense strand starting at position 2024 of SEQ ID NO: 3399"
auaagugcccuuuguaucu

SEQ ID NO: 3028 - RNA, 19 nt, Artificial Sequence
  source: /note="Description of Artificial Sequence: Synthetic oligonucleotide"
  source: /note="Antisense strand to SEQ ID NO: 3027"
agauacaaagggcacuuau

SEQ ID NO: 3029 - RNA, 19 nt, Artificial Sequence
  source: /note="Description of Artificial Sequence: Synthetic oligonucleotide"
  source: /note="Sense strand starting at position 2024 of SEQ ID NO: 3411"
uguaucuugcacugugagu

SEQ ID NO: 3030 - RNA, 19 nt, Artificial Sequence
  source: /note="Description of Artificial Sequence: Synthetic oligonucleotide"
  source: /note="Antisense strand to SEQ ID NO: 3029"
acucacagugcaagauaca

SEQ ID NO: 3031 - RNA, 19 nt, Artificial Sequence
  source: /note="Description of Artificial Sequence: Synthetic oligonucleotide"
  source: /note="Sense strand starting at position 2024 of SEQ ID NO: 3413"
uaucuugcacugugaguuu

SEQ ID NO: 3032 - RNA, 19 nt, Artificial Sequence
  source: /note="Description of Artificial Sequence: Synthetic oligonucleotide"
  source: /note="Antisense strand to SEQ ID NO: 3031"
aaacucacagugcaagaua

SEQ ID NO: 3033 - RNA, 19 nt, Artificial Sequence
  source: /note="Description of Artificial Sequence: Synthetic oligonucleotide"
  source: /note="Sense strand starting at position 2024 of SEQ ID NO: 3493"
acaucaauaucacguggga

SEQ ID NO: 3034 - RNA, 19 nt, Artificial Sequence
  source: /note="Description of Artificial Sequence: Synthetic oligonucleotide"
  source: /note="Antisense strand to SEQ ID NO: 3033"
ucccacgugauauugaugu

SEQ ID NO: 3035 - RNA, 19 nt, Artificial Sequence
  source: /note="Description of Artificial Sequence: Synthetic oligonucleotide"
  source: /note="Sense strand starting at position 2024 of SEQ ID NO: 3670"
aaagauguguccuggguaa

SEQ ID NO: 3036 - RNA, 19 nt, Artificial Sequence
  source: /note="Description of Artificial Sequence: Synthetic oligonucleotide"
  source: /note="Antisense strand to SEQ ID NO: 3035"
uuacccaggacacaucuuu

SEQ ID NO: 3037 - RNA, 19 nt, Artificial Sequence
  source: /note="Description of Artificial Sequence: Synthetic oligonucleotide"
  source: /note="Sense strand starting at position 2024 of SEQ ID NO: 3677"
uguccuggguaaugucuaa

SEQ ID NO: 3038 - RNA, 19 nt, Artificial Sequence
  source: /note="Description of Artificial Sequence: Synthetic oligonucleotide"
  source: /note="Antisense strand to SEQ ID NO: 3037"
uuagacauuacccaggaca

SEQ ID NO: 3039 - RNA, 19 nt, Artificial Sequence
  source: /note="Description of Artificial Sequence: Synthetic oligonucleotide"
  source: /note="Sense strand starting at position 2024 of SEQ ID NO: 3696"
agcaccaaauccugauaga

SEQ ID NO: 3040 - RNA, 19 nt, Artificial Sequence
  source: /note="Description of Artificial Sequence: Synthetic oligonucleotide"
  source: /note="Antisense strand to SEQ ID NO: 3039"
ucuaucaggauuuggugcu

SEQ ID NO: 3041 - RNA, 19 nt, Artificial Sequence
  source: /note="Description of Artificial Sequence: Synthetic oligonucleotide"
  source: /note="Sense strand starting at position 2024 of SEQ ID NO: 3790"
auuucugcauuguguggaa

SEQ ID NO: 3042 - RNA, 19 nt, Artificial Sequence
  source: /note="Description of Artificial Sequence: Synthetic oligonucleotide"
  source: /note="Antisense strand to SEQ ID NO: 3041"
uuccacacaaugcagaaau

SEQ ID NO: 3043 - RNA, 19 nt, Artificial Sequence
  source: /note="Description of Artificial Sequence: Synthetic oligonucleotide"
  source: /note="Sense strand starting at position 2023 of SEQ ID NO: 92"
gagaaauccuaguguaauu

SEQ ID NO: 3044 - RNA, 19 nt, Artificial Sequence
  source: /note="Description of Artificial Sequence: Synthetic oligonucleotide"
  source: /note="Antisense strand to SEQ ID NO: 3043"
aauuacacuaggauuucuc

SEQ ID NO: 3045 - RNA, 19 nt, Artificial Sequence
  source: /note="Description of Artificial Sequence: Synthetic oligonucleotide"
  source: /note="Sense strand starting at position 2023 of SEQ ID NO: 338"
guacauauaugauagucua

SEQ ID NO: 3046 - RNA, 19 nt, Artificial Sequence
  source: /note="Description of Artificial Sequence: Synthetic oligonucleotide"
  source: /note="Antisense strand to SEQ ID NO: 3045"
uagacuaucauauauguac

SEQ ID NO: 3047 - RNA, 19 nt, Artificial Sequence
  source: /note="Description of Artificial Sequence: Synthetic oligonucleotide"
  source: /note="Sense strand starting at position 2023 of SEQ ID NO: 346"
augauagucuauuaacuug

SEQ ID NO: 3048 - RNA, 19 nt, Artificial Sequence
  source: /note="Description of Artificial Sequence: Synthetic oligonucleotide"
  source: /note="Antisense strand to SEQ ID NO: 3047"
caaguuaauagacuaucau

SEQ ID NO: 3049 - RNA, 19 nt, Artificial Sequence
  source: /note="Description of Artificial Sequence: Synthetic oligonucleotide"
  source: /note="Sense strand starting at position 2023 of SEQ ID NO: 353"
ucuauuaacuuggaugauu

SEQ ID NO: 3050 - RNA, 19 nt, Artificial Sequence
  source: /note="Description of Artificial Sequence: Synthetic oligonucleotide"
  source: /note="Antisense strand to SEQ ID NO: 3049"
aaucauccaaguuaauaga

SEQ ID NO: 3051 - RNA, 19 nt, Artificial Sequence
  source: /note="Description of Artificial Sequence: Synthetic oligonucleotide"
  source: /note="Sense strand starting at position 2023 of SEQ ID NO: 407"
gccgaaagauucuguauua

SEQ ID NO: 3052 - RNA, 19 nt, Artificial Sequence
  source: /note="Description of Artificial Sequence: Synthetic oligonucleotide"
  source: /note="Antisense strand to SEQ ID NO: 3051"
uaauacagaaucuuucggc

SEQ ID NO: 3053 - RNA, 19 nt, Artificial Sequence
  source: /note="Description of Artificial Sequence: Synthetic oligonucleotide"
  source: /note="Sense strand starting at position 2023 of SEQ ID NO: 498"
acaaucacuuguuaaaugu

SEQ ID NO: 3054 - RNA, 19 nt, Artificial Sequence
  source: /note="Description of Artificial Sequence: Synthetic oligonucleotide"
  source: /note="Antisense strand to SEQ ID NO: 3053"
acauuuaacaagugauugu

SEQ ID NO: 3055 - RNA, 19 nt, Artificial Sequence
  source: /note="Description of Artificial Sequence: Synthetic oligonucleotide"
  source: /note="Sense strand starting at position 2023 of SEQ ID NO: 534"
uuguuacccuaguggugau

SEQ ID NO: 3056 - RNA, 19 nt, Artificial Sequence
  source: /note="Description of Artificial Sequence: Synthetic oligonucleotide"
  source: /note="Antisense strand to SEQ ID NO: 3055"
aucaccacuaggguaacaa

SEQ ID NO: 3057 - RNA, 19 nt, Artificial Sequence
  source: /note="Description of Artificial Sequence: Synthetic oligonucleotide"
  source: /note="Sense strand starting at position 2023 of SEQ ID NO: 537"
uuacccuaguggugauaaa

SEQ ID NO: 3058 - RNA, 19 nt, Artificial Sequence
  source: /note="Description of Artificial Sequence: Synthetic oligonucleotide"
  source: /note="Antisense strand to SEQ ID NO: 3057"
uuuaucaccacuaggguaa

SEQ ID NO: 3059 - RNA, 19 nt, Artificial Sequence
  source: /note="Description of Artificial Sequence: Synthetic oligonucleotide"
  source: /note="Sense strand starting at position 2023 of SEQ ID NO: 603"
augacagcaugugaagaua

SEQ ID NO: 3060 - RNA, 19 nt, Artificial Sequence
  source: /note="Description of Artificial Sequence: Synthetic oligonucleotide"
  source: /note="Antisense strand to SEQ ID NO: 3059"
uaucuucacaugcugucau

SEQ ID NO: 3061 - RNA, 19 nt, Artificial Sequence
  source: /note="Description of Artificial Sequence: Synthetic oligonucleotide"
  source: /note="Sense strand starting at position 2023 of SEQ ID NO: 966"
cagagaaauuaagagcagu

SEQ ID NO: 3062 - RNA, 19 nt, Artificial Sequence
  source: /note="Description of Artificial Sequence: Synthetic oligonucleotide"
  source: /note="Antisense strand to SEQ ID NO: 3061"
acugcucuuaauuucucug

SEQ ID NO: 3063 - RNA, 19 nt, Artificial Sequence
  source: /note="Description of Artificial Sequence: Synthetic oligonucleotide"
  source: /note="Sense strand starting at position 2023 of SEQ ID NO: 1055"
ugaaacagaugcuagaguu

SEQ ID NO: 3064 - RNA, 19 nt, Artificial Sequence
  source: /note="Description of Artificial Sequence: Synthetic oligonucleotide"
  source: /note="Antisense strand to SEQ ID NO: 3063"
aacucuagcaucuguuuca

SEQ ID NO: 3065 - RNA, 19 nt, Artificial Sequence
  source: /note="Description of Artificial Sequence: Synthetic oligonucleotide"
  source: /note="Sense strand starting at position 2023 of SEQ ID NO: 1146"
gcuagaaauugaugaggag

SEQ ID NO: 3066 - RNA, 19 nt, Artificial Sequence
  source: /note="Description of Artificial Sequence: Synthetic oligonucleotide"
  source: /note="Antisense strand to SEQ ID NO: 3065"
cuccucaucaauuucuagc

SEQ ID NO: 3067 - RNA, 19 nt, Artificial Sequence
  source: /note="Description of Artificial Sequence: Synthetic oligonucleotide"
  source: /note="Sense strand starting at position 2023 of SEQ ID NO: 1251"
cucucacugucugaauaug

SEQ ID NO: 3068 - RNA, 19 nt, Artificial Sequence
  source: /note="Description of Artificial Sequence: Synthetic oligonucleotide"
  source: /note="Antisense strand to SEQ ID NO: 3067"
cauauucagacagugagag

SEQ ID NO: 3069 - RNA, 19 nt, Artificial Sequence
  source: /note="Description of Artificial Sequence: Synthetic oligonucleotide"
  source: /note="Sense strand starting at position 2023 of SEQ ID NO: 1259"
gucugaauaugccaauaca

SEQ ID NO: 3070 - RNA, 19 nt, Artificial Sequence
  source: /note="Description of Artificial Sequence: Synthetic oligonucleotide"
  source: /note="Antisense strand to SEQ ID NO: 3069"
uguauuggcauauucagac

SEQ ID NO: 3071 - RNA, 19 nt, Artificial Sequence
  source: /note="Description of Artificial Sequence: Synthetic oligonucleotide"
  source: /note="Sense strand starting at position 2023 of SEQ ID NO: 1516"
gcaacacuguuugcagagu

SEQ ID NO: 3072 - RNA, 19 nt, Artificial Sequence
  source: /note="Description of Artificial Sequence: Synthetic oligonucleotide"
  source: /note="Antisense strand to SEQ ID NO: 3071"
acucugcaaacaguguugc

SEQ ID NO: 3073 - RNA, 19 nt, Artificial Sequence
  source: /note="Description of Artificial Sequence: Synthetic oligonucleotide"
  source: /note="Sense strand starting at position 2023 of SEQ ID NO: 1600"
gccagcuucuaauuguauu

SEQ ID NO: 3074 - RNA, 19 nt, Artificial Sequence
  source: /note="Description of Artificial Sequence: Synthetic oligonucleotide"
  source: /note="Antisense strand to SEQ ID NO: 3073"
aauacaauuagaagcuggc

SEQ ID NO: 3075 - RNA, 19 nt, Artificial Sequence
  source: /note="Description of Artificial Sequence: Synthetic oligonucleotide"
  source: /note="Sense strand starting at position 2023 of SEQ ID NO: 1688"
caauaaguuggcugcugua

SEQ ID NO: 3076 - RNA, 19 nt, Artificial Sequence
  source: /note="Description of Artificial Sequence: Synthetic oligonucleotide"
  source: /note="Antisense strand to SEQ ID NO: 3075"
uacagcagccaacuuauug

SEQ ID NO: 3077 - RNA, 19 nt, Artificial Sequence
  source: /note="Description of Artificial Sequence: Synthetic oligonucleotide"
  source: /note="Sense strand starting at position 2023 of SEQ ID NO: 1691"
uaaguuggcugcuguaaca

SEQ ID NO: 3078 - RNA, 19 nt, Artificial Sequence
  source: /note="Description of Artificial Sequence: Synthetic oligonucleotide"
  source: /note="Antisense strand to SEQ ID NO: 3077"
uguuacagcagccaacuua

SEQ ID NO: 3079 - RNA, 19 nt, Artificial Sequence
  source: /note="Description of Artificial Sequence: Synthetic oligonucleotide"
  source: /note="Sense strand starting at position 2023 of SEQ ID NO: 1739"
uccugauucugucaucuuc

SEQ ID NO: 3080 - RNA, 19 nt, Artificial Sequence
  source: /note="Description of Artificial Sequence: Synthetic oligonucleotide"
  source: /note="Antisense strand to SEQ ID NO: 3079"
gaagaugacagaaucagga

SEQ ID NO: 3081 - RNA, 19 nt, Artificial Sequence
  source: /note="Description of Artificial Sequence: Synthetic oligonucleotide"
  source: /note="Sense strand starting at position 2023 of SEQ ID NO: 1852"
gggcaugccuaacaugauu

SEQ ID NO: 3082 - RNA, 19 nt, Artificial Sequence
  source: /note="Description of Artificial Sequence: Synthetic oligonucleotide"
  source: /note="Antisense strand to SEQ ID NO: 3081"
aaucauguuaggcaugccc

SEQ ID NO: 3083 - RNA, 19 nt, Artificial Sequence
  source: /note="Description of Artificial Sequence: Synthetic oligonucleotide"
  source: /note="Sense strand starting at position 2023 of SEQ ID NO: 1896"
cuacaacgucgguguggua

SEQ ID NO: 3084 - RNA, 19 nt, Artificial Sequence
  source: /note="Description of Artificial Sequence: Synthetic oligonucleotide"
  source: /note="Antisense strand to SEQ ID NO: 3083"
uaccacaccgacguuguag

SEQ ID NO: 3085 - RNA, 19 nt, Artificial Sequence
  source: /note="Description of Artificial Sequence: Synthetic oligonucleotide"
  source: /note="Sense strand starting at position 2023 of SEQ ID NO: 1921"
cugacuaucugauacguca

SEQ ID NO: 3086 - RNA, 19 nt, Artificial Sequence
  source: /note="Description of Artificial Sequence: Synthetic oligonucleotide"
  source: /note="Antisense strand to SEQ ID NO: 3085"
ugacguaucagauagucag

SEQ ID NO: 3087 - RNA, 19 nt, Artificial Sequence
  source: /note="Description of Artificial Sequence: Synthetic oligonucleotide"
  source: /note="Sense strand starting at position 2023 of SEQ ID NO: 1950"
accuauaccucggagcaaa

SEQ ID NO: 3088 - RNA, 19 nt, Artificial Sequence
  source: /note="Description of Artificial Sequence: Synthetic oligonucleotide"
  source: /note="Antisense strand to SEQ ID NO: 3087"
uuugcuccgagguauaggu

SEQ ID NO: 3089 - RNA, 19 nt, Artificial Sequence
  source: /note="Description of Artificial Sequence: Synthetic oligonucleotide"
  source: /note="Sense strand starting at position 2023 of SEQ ID NO: 1987"
guuugcauuuaacgagcau

SEQ ID NO: 3090 - RNA, 19 nt, Artificial Sequence
  source: /note="Description of Artificial Sequence: Synthetic oligonucleotide"
  source: /note="Antisense strand to SEQ ID NO: 3089"
augcucguuaaaugcaaac

SEQ ID NO: 3091 - RNA, 19 nt, Artificial Sequence
  source: /note="Description of Artificial Sequence: Synthetic oligonucleotide"
  source: /note="Sense strand starting at position 2023 of SEQ ID NO: 1999"
cgagcauucuuccugccua

SEQ ID NO: 3092 - RNA, 19 nt, Artificial Sequence
  source: /note="Description of Artificial Sequence: Synthetic oligonucleotide"
  source: /note="Antisense strand to SEQ ID NO: 3091"
uaggcaggaagaaugcucg

SEQ ID NO: 3093 - RNA, 19 nt, Artificial Sequence
  source: /note="Description of Artificial Sequence: Synthetic oligonucleotide"
  source: /note="Sense strand starting at position 2023 of SEQ ID NO: 2078"
gccuuuggauuagauuauu

SEQ ID NO: 3094 - RNA, 19 nt, Artificial Sequence
  source: /note="Description of Artificial Sequence: Synthetic oligonucleotide"
  source: /note="Antisense strand to SEQ ID NO: 3093"
aauaaucuaauccaaaggc

SEQ ID NO: 3095 - RNA, 19 nt, Artificial Sequence
  source: /note="Description of Artificial Sequence: Synthetic oligonucleotide"
  source: /note="Sense strand starting at position 2023 of SEQ ID NO: 2098"
uccuaaguguaacaauagu

SEQ ID NO: 3096 - RNA, 19 nt, Artificial Sequence
  source: /note="Description of Artificial Sequence: Synthetic oligonucleotide"
  source: /note="Antisense strand to SEQ ID NO: 3095"
acuauuguuacacuuagga

SEQ ID NO: 3097 - RNA, 19 nt, Artificial Sequence
  source: /note="Description of Artificial Sequence: Synthetic oligonucleotide"
  source: /note="Sense strand starting at position 2023 of SEQ ID NO: 2104"
guguaacaauaguagaguu

SEQ ID NO: 3098 - RNA, 19 nt, Artificial Sequence
  source: /note="Description of Artificial Sequence: Synthetic oligonucleotide"
  source: /note="Antisense strand to SEQ ID NO: 3097"
aacucuacuauuguuacac

SEQ ID NO: 3099 - RNA, 19 nt, Artificial Sequence
  source: /note="Description of Artificial Sequence: Synthetic oligonucleotide"
  source: /note="Sense strand starting at position 2023 of SEQ ID NO: 2292"
gaauuugccucuugugacu

SEQ ID NO: 3100 - RNA, 19 nt, Artificial Sequence
  source: /note="Description of Artificial Sequence: Synthetic oligonucleotide"
  source: /note="Antisense strand to SEQ ID NO: 3099"
agucacaagaggcaaauuc

SEQ ID NO: 3101 - RNA, 19 nt, Artificial Sequence
  source: /note="Description of Artificial Sequence: Synthetic oligonucleotide"
  source: /note="Sense strand starting at position 2023 of SEQ ID NO: 2395"
guaugcuucucccaagggu

SEQ ID NO: 3102 - RNA, 19 nt, Artificial Sequence
  source: /note="Description of Artificial Sequence: Synthetic oligonucleotide"
  source: /note="Antisense strand to SEQ ID NO: 3101"
acccuugggagaagcauac

SEQ ID NO: 3103 - RNA, 19 nt, Artificial Sequence
  source: /note="Description of Artificial Sequence: Synthetic oligonucleotide"
  source: /note="Sense strand starting at position 2023 of SEQ ID NO: 2593"
uguuaucaauuauaccgua

SEQ ID NO: 3104 - RNA, 19 nt, Artificial Sequence
  source: /note="Description of Artificial Sequence: Synthetic oligonucleotide"
  source: /note="Antisense strand to SEQ ID NO: 3103"
uacgguauaauugauaaca

SEQ ID NO: 3105 - RNA, 19 nt, Artificial Sequence
  source: /note="Description of Artificial Sequence: Synthetic oligonucleotide"
  source: /note="Sense strand starting at position 2023 of SEQ ID NO: 2721"
uguuuccucucagauuugu

SEQ ID NO: 3106 - RNA, 19 nt, Artificial Sequence
  source: /note="Description of Artificial Sequence: Synthetic oligonucleotide"
  source: /note="Antisense strand to SEQ ID NO: 3105"
acaaaucugagaggaaaca

SEQ ID NO: 3107 - RNA, 19 nt, Artificial Sequence
  source: /note="Description of Artificial Sequence: Synthetic oligonucleotide"
  source: /note="Sense strand starting at position 2023 of SEQ ID NO: 2749"
uuaguuuguuaggaaagcu

SEQ ID NO: 3108 - RNA, 19 nt, Artificial Sequence
  source: /note="Description of Artificial Sequence: Synthetic oligonucleotide"
  source: /note="Antisense strand to SEQ ID NO: 3107"
agcuuuccuaacaaacuaa

SEQ ID NO: 3109 - RNA, 19 nt, Artificial Sequence
  source: /note="Description of Artificial Sequence: Synthetic oligonucleotide"
  source: /note="Sense strand starting at position 2023 of SEQ ID NO: 2850"
ugugaaauaugccaauauc

SEQ ID NO: 3110 - RNA, 19 nt, Artificial Sequence
  source: /note="Description of Artificial Sequence: Synthetic oligonucleotide"
  source: /note="Antisense strand to SEQ ID NO: 3109"
gauauuggcauauuucaca

SEQ ID NO: 3111 - RNA, 19 nt, Artificial Sequence
  source: /note="Description of Artificial Sequence: Synthetic oligonucleotide"
  source: /note="Sense strand starting at position 2023 of SEQ ID NO: 2858"
augccaauaucgcuauucu

SEQ ID NO: 3112 - RNA, 19 nt, Artificial Sequence
  source: /note="Description of Artificial Sequence: Synthetic oligonucleotide"
  source: /note="Antisense strand to SEQ ID NO: 3111"
agaauagcgauauuggcau

SEQ ID NO: 3113 - RNA, 19 nt, Artificial Sequence
  source: /note="Description of Artificial Sequence: Synthetic oligonucleotide"
  source: /note="Sense strand starting at position 2023 of SEQ ID NO: 2928"
gugugugcuuugugugcaa

SEQ ID NO: 3114 - RNA, 19 nt, Artificial Sequence
  source: /note="Description of Artificial Sequence: Synthetic oligonucleotide"
  source: /note="Antisense strand to SEQ ID NO: 3113"
uugcacacaaagcacacac

SEQ ID NO: 3115 - RNA, 19 nt, Artificial Sequence
  source: /note="Description of Artificial Sequence: Synthetic oligonucleotide"
  source: /note="Sense strand starting at position 2023 of SEQ ID NO: 2930"
gugugcuuugugugcaagu

SEQ ID NO: 3116 - RNA, 19 nt, Artificial Sequence
  source: /note="Description of Artificial Sequence: Synthetic oligonucleotide"
  source: /note="Antisense strand to SEQ ID NO: 3115"
acuugcacacaaagcacac

SEQ ID NO: 3117 - RNA, 19 nt, Artificial Sequence
  source: /note="Description of Artificial Sequence: Synthetic oligonucleotide"
  source: /note="Sense strand starting at position 2023 of SEQ ID NO: 2931"
ugugcuuugugugcaagua

SEQ ID NO: 3118 - RNA, 19 nt, Artificial Sequence
  source: /note="Description of Artificial Sequence: Synthetic oligonucleotide"
  source: /note="Antisense strand to SEQ ID NO: 3117"
uacuugcacacaaagcaca

SEQ ID NO: 3119 - RNA, 19 nt, Artificial Sequence
  source: /note="Description of Artificial Sequence: Synthetic oligonucleotide"
  source: /note="Sense strand starting at position 2023 of SEQ ID NO: 2932"
gugcuuugugugcaaguac

SEQ ID NO: 3120 - RNA, 19 nt, Artificial Sequence
  source: /note="Description of Artificial Sequence: Synthetic oligonucleotide"
  source: /note="Antisense strand to SEQ ID NO: 3119"
guacuugcacacaaagcac

SEQ ID NO: 3121 - RNA, 19 nt, Artificial Sequence
  source: /note="Description of Artificial Sequence: Synthetic oligonucleotide"
  source: /note="Sense strand starting at position 2023 of SEQ ID NO: 3201"
agucuucggugauuagcau

SEQ ID NO: 3122 - RNA, 19 nt, Artificial Sequence
  source: /note="Description of Artificial Sequence: Synthetic oligonucleotide"
  source: /note="Antisense strand to SEQ ID NO: 3121"
augcuaaucaccgaagacu

SEQ ID NO: 3123 - RNA, 19 nt, Artificial Sequence
  source: /note="Description of Artificial Sequence: Synthetic oligonucleotide"
  source: /note="Sense strand starting at position 2023 of SEQ ID NO: 3243"
gcauaaaugccauguguuu

SEQ ID NO: 3124 - RNA, 19 nt, Artificial Sequence
  source: /note="Description of Artificial Sequence: Synthetic oligonucleotide"
  source: /note="Antisense strand to SEQ ID NO: 3123"
aaacacauggcauuuaugc

SEQ ID NO: 3125 - RNA, 19 nt, Artificial Sequence
  source: /note="Description of Artificial Sequence: Synthetic oligonucleotide"
  source: /note="Sense strand starting at position 2023 of SEQ ID NO: 3468"
guauacaaguuguacaaca

SEQ ID NO: 3126 - RNA, 19 nt, Artificial Sequence
  source: /note="Description of Artificial Sequence: Synthetic oligonucleotide"
  source: /note="Antisense strand to SEQ ID NO: 3125"
uguuguacaacuuguauac

SEQ ID NO: 3127 - RNA, 19 nt, Artificial Sequence
  source: /note="Description of Artificial Sequence: Synthetic oligonucleotide"
  source: /note="Sense strand starting at position 2023 of SEQ ID NO: 3568"
uuguguauuuggugauaac

SEQ ID NO: 3128 - RNA, 19 nt, Artificial Sequence
  source: /note="Description of Artificial Sequence: Synthetic oligonucleotide"
  source: /note="Antisense strand to SEQ ID NO: 3127"
guuaucaccaaauacacaa

SEQ ID NO: 3129 - RNA, 19 nt, Artificial Sequence
  source: /note="Description of Artificial Sequence: Synthetic oligonucleotide"
  source: /note="Sense strand starting at position 2023 of SEQ ID NO: 3592"
agauuacucucuuagugca

SEQ ID NO: 3130 - RNA, 19 nt, Artificial Sequence
  source: /note="Description of Artificial Sequence: Synthetic oligonucleotide"
  source: /note="Antisense strand to SEQ ID NO: 3129"
ugcacuaagagaguaaucu

SEQ ID NO: 3131 - RNA, 19 nt, Artificial Sequence
  source: /note="Description of Artificial Sequence: Synthetic oligonucleotide"
  source: /note="Sense strand starting at position 2023 of SEQ ID NO: 3607"
ugcauacuguaguguuauu

SEQ ID NO: 3132 - RNA, 19 nt, Artificial Sequence
  source: /note="Description of Artificial Sequence: Synthetic oligonucleotide"
  source: /note="Antisense strand to SEQ ID NO: 3131"
aauaacacuacaguaugca

SEQ ID NO: 3133 - RNA, 19 nt, Artificial Sequence
  source: /note="Description of Artificial Sequence: Synthetic oligonucleotide"
  source: /note="Sense strand starting at position 2023 of SEQ ID NO: 3843"
agcguaauguucuucaggu

SEQ ID NO: 3134 - RNA, 19 nt, Artificial Sequence
  source: /note="Description of Artificial Sequence: Synthetic oligonucleotide"
  source: /note="Antisense strand to SEQ ID NO: 3133"
accugaagaacauuacgcu

SEQ ID NO: 3135 - RNA, 19 nt, Artificial Sequence
  source: /note="Description of Artificial Sequence: Synthetic oligonucleotide"
  source: /note="Sense strand starting at position 2023 of SEQ ID NO: 3844"
gcguaauguucuucagguu

SEQ ID NO: 3136 - RNA, 19 nt, Artificial Sequence
  source: /note="Description of Artificial Sequence: Synthetic oligonucleotide"
  source: /note="Antisense strand to SEQ ID NO: 3135"
aaccugaagaacauuacgc

SEQ ID NO: 3137 - RNA, 19 nt, Artificial Sequence
  source: /note="Description of Artificial Sequence: Synthetic oligonucleotide"
  source: /note="Sense strand starting at position 2023 of SEQ ID NO: 3964"
gauguacacucagguuguu

SEQ ID NO: 3138 - RNA, 19 nt, Artificial Sequence
  source: /note="Description of Artificial Sequence: Synthetic oligonucleotide"
  source: /note="Antisense strand to SEQ ID NO: 3137"
aacaaccugaguguacauc

SEQ ID NO: 3139 - RNA, 19 nt, Artificial Sequence
  source: /note="Description of Artificial Sequence: Synthetic oligonucleotide"
  source: /note="Sense strand starting at position 2031 of SEQ ID NO: 289"
gugaaugaauaaugaaugu

SEQ ID NO: 3140 - RNA, 19 nt, Artificial Sequence
  source: /note="Description of Artificial Sequence: Synthetic oligonucleotide"
  source: /note="Antisense strand to SEQ ID NO: 3139"
acauucauuauucauucac

SEQ ID NO: 3141 - RNA, 19 nt, Artificial Sequence
  source: /note="Description of Artificial Sequence: Synthetic oligonucleotide"
  source: /note="Sense strand starting at position 2031 of SEQ ID NO: 590"
gccaucucagccugggauu

SEQ ID NO: 3142 - RNA, 19 nt, Artificial Sequence
  source: /note="Description of Artificial Sequence: Synthetic oligonucleotide"
  source: /note="Antisense strand to SEQ ID NO: 3141"
aaucccaggcugagauggc

SEQ ID NO: 3143 - RNA, 19 nt, Artificial Sequence
  source: /note="Description of Artificial Sequence: Synthetic oligonucleotide"
  source: /note="Sense strand starting at position 2031 of SEQ ID NO: 591"
ccaucucagccugggauua

SEQ ID NO: 3144 - RNA, 19 nt, Artificial Sequence
  source: /note="Description of Artificial Sequence: Synthetic oligonucleotide"
  source: /note="Antisense strand to SEQ ID NO: 3143"
uaaucccaggcugagaugg

SEQ ID NO: 3145 - RNA, 19 nt, Artificial Sequence
  source: /note="Description of Artificial Sequence: Synthetic oligonucleotide"
  source: /note="Sense strand starting at position 2031 of SEQ ID NO: 592"
caucucagccugggauuau

SEQ ID NO: 3146 - RNA, 19 nt, Artificial Sequence
  source: /note="Description of Artificial Sequence: Synthetic oligonucleotide"
  source: /note="Antisense strand to SEQ ID NO: 3145"
auaaucccaggcugagaug

SEQ ID NO: 3147 - RNA, 19 nt, Artificial Sequence
  source: /note="Description of Artificial Sequence: Synthetic oligonucleotide"
  source: /note="Sense strand starting at position 2031 of SEQ ID NO: 593"
aucucagccugggauuaua

SEQ ID NO: 3148 - RNA, 19 nt, Artificial Sequence
  source: /note="Description of Artificial Sequence: Synthetic oligonucleotide"
  source: /note="Antisense strand to SEQ ID NO: 3147"
uauaaucccaggcugagau

SEQ ID NO: 3149 - RNA, 19 nt, Artificial Sequence
  source: /note="Description of Artificial Sequence: Synthetic oligonucleotide"
  source: /note="Sense strand starting at position 2031 of SEQ ID NO: 926"
uugccuaguuuccagguau

SEQ ID NO: 3150 - RNA, 19 nt, Artificial Sequence
  source: /note="Description of Artificial Sequence: Synthetic oligonucleotide"
  source: /note="Antisense strand to SEQ ID NO: 3149"
auaccuggaaacuaggcaa

SEQ ID NO: 3151 - RNA, 19 nt, Artificial Sequence
  source: /note="Description of Artificial Sequence: Synthetic oligonucleotide"
  source: /note="Sense strand starting at position 2031 of SEQ ID NO: 930"
cuaguuuccagguaugguu

SEQ ID NO: 3152 - RNA, 19 nt, Artificial Sequence
  source: /note="Description of Artificial Sequence: Synthetic oligonucleotide"
  source: /note="Antisense strand to SEQ ID NO: 3151"
aaccauaccuggaaacuag

SEQ ID NO: 3153 - RNA, 19 nt, Artificial Sequence
  source: /note="Description of Artificial Sequence: Synthetic oligonucleotide"
  source: /note="Sense strand starting at position 2031 of SEQ ID NO: 957"
ccagacuuauucuuaugua

SEQ ID NO: 3154 - RNA, 19 nt, Artificial Sequence
  source: /note="Description of Artificial Sequence: Synthetic oligonucleotide"
  source: /note="Antisense strand to SEQ ID NO: 3153"
uacauaagaauaagucugg

SEQ ID NO: 3155 - RNA, 19 nt, Artificial Sequence
  source: /note="Description of Artificial Sequence: Synthetic oligonucleotide"
  source: /note="Sense strand starting at position 2031 of SEQ ID NO: 1059"
gcgugaguucuguggaaug

SEQ ID NO: 3156 - RNA, 19 nt, Artificial Sequence
  source: /note="Description of Artificial Sequence: Synthetic oligonucleotide"
  source: /note="Antisense strand to SEQ ID NO: 3155"
cauuccacagaacucacgc

SEQ ID NO: 3157 - RNA, 19 nt, Artificial Sequence
  source: /note="Description of Artificial Sequence: Synthetic oligonucleotide"
  source: /note="Sense strand starting at position 2031 of SEQ ID NO: 1061"
gugaguucuguggaaugug

SEQ ID NO: 3158 - RNA, 19 nt, Artificial Sequence
  source: /note="Description of Artificial Sequence: Synthetic oligonucleotide"
  source: /note="Antisense strand to SEQ ID NO: 3157"
cacauuccacagaacucac

SEQ ID NO: 3159 - RNA, 19 nt, Artificial Sequence
  source: /note="Description of Artificial Sequence: Synthetic oligonucleotide"
  source: /note="Sense strand starting at position 2031 of SEQ ID NO: 1089"
gggucucaccgugauauuc

SEQ ID NO: 3160 - RNA, 19 nt, Artificial Sequence
  source: /note="Description of Artificial Sequence: Synthetic oligonucleotide"
  source: /note="Antisense strand to SEQ ID NO: 3159"
gaauaucacggugagaccc

SEQ ID NO: 3161 - RNA, 19 nt, Artificial Sequence
  source: /note="Description of Artificial Sequence: Synthetic oligonucleotide"
  source: /note="Sense strand starting at position 2031 of SEQ ID NO: 1437"
auccacuucuccggccaaa

SEQ ID NO: 3162 - RNA, 19 nt, Artificial Sequence
  source: /note="Description of Artificial Sequence: Synthetic oligonucleotide"
  source: /note="Antisense strand to SEQ ID NO: 3161"
uuuggccggagaaguggau

SEQ ID NO: 3163 - RNA, 19 nt, Artificial Sequence
  source: /note="Description of Artificial Sequence: Synthetic oligonucleotide"
  source: /note="Sense strand starting at position 2031 of SEQ ID NO: 1458"
ucaauccuggugugacaga

SEQ ID NO: 3164 - RNA, 19 nt, Artificial Sequence
  source: /note="Description of Artificial Sequence: Synthetic oligonucleotide"
  source: /note="Antisense strand to SEQ ID NO: 3163"
ucugucacaccaggauuga

SEQ ID NO: 3165 - RNA, 19 nt, Artificial Sequence
  source: /note="Description of Artificial Sequence: Synthetic oligonucleotide"
  source: /note="Sense strand starting at position 2031 of SEQ ID NO: 2078"
ggcuguuaucugcaugugu

SEQ ID NO: 3166 - RNA, 19 nt, Artificial Sequence
  source: /note="Description of Artificial Sequence: Synthetic oligonucleotide"
  source: /note="Antisense strand to SEQ ID NO: 3165"
acacaugcagauaacagcc

SEQ ID NO: 3167 - RNA, 19 nt, Artificial Sequence
  source: /note="Description of Artificial Sequence: Synthetic oligonucleotide"
  source: /note="Sense strand starting at position 2031 of SEQ ID NO: 2313"
gagcgugcuaucugggaaa

SEQ ID NO: 3168 - RNA, 19 nt, Artificial Sequence
  source: /note="Description of Artificial Sequence: Synthetic oligonucleotide"
  source: /note="Antisense strand to SEQ ID NO: 3167"
uuucccagauagcacgcuc

SEQ ID NO: 3169 - RNA, 19 nt, Artificial Sequence
  source: /note="Description of Artificial Sequence: Synthetic oligonucleotide"
  source: /note="Sense strand starting at position 2031 of SEQ ID NO: 2386"
cagagaugccuggguugcu

SEQ ID NO: 3170 - RNA, 19 nt, Artificial Sequence
  source: /note="Description of Artificial Sequence: Synthetic oligonucleotide"
  source: /note="Antisense strand to SEQ ID NO: 3169"
agcaacccaggcaucucug

SEQ ID NO: 3171 - RNA, 19 nt, Artificial Sequence
  source: /note="Description of Artificial Sequence: Synthetic oligonucleotide"
  source: /note="Sense strand starting at position 2031 of SEQ ID NO: 2401"
ugcugaguuccgcaaagua

SEQ ID NO: 3172 - RNA, 19 nt, Artificial Sequence
  source: /note="Description of Artificial Sequence: Synthetic oligonucleotide"
  source: /note="Antisense strand to SEQ ID NO: 3171"
uacuuugcggaacucagca

SEQ ID NO: 3173 - RNA, 19 nt, Artificial Sequence
  source: /note="Description of Artificial Sequence: Synthetic oligonucleotide"
  source: /note="Sense strand starting at position 2031 of SEQ ID NO: 2454"
gcaaaugaguggucucccu

SEQ ID NO: 3174 - RNA, 19 nt, Artificial Sequence
  source: /note="Description of Artificial Sequence: Synthetic oligonucleotide"
  source: /note="Antisense strand to SEQ ID NO: 3173"
agggagaccacucauuugc

SEQ ID NO: 3175 - RNA, 19 nt, Artificial Sequence
  source: /note="Description of Artificial Sequence: Synthetic oligonucleotide"
  source: /note="Sense strand starting at position 2031 of SEQ ID NO: 2508"
ugaccauguugaggaauuu

SEQ ID NO: 3176 - RNA, 19 nt, Artificial Sequence
  source: /note="Description of Artificial Sequence: Synthetic oligonucleotide"
  source: /note="Antisense strand to SEQ ID NO: 3175"
aaauuccucaacaugguca

SEQ ID NO: 3177 - RNA, 19 nt, Artificial Sequence
  source: /note="Description of Artificial Sequence: Synthetic oligonucleotide"
  source: /note="Sense strand starting at position 2031 of SEQ ID NO: 2584"
cgucuaguacucugcaaac

SEQ ID NO: 3178 - RNA, 19 nt, Artificial Sequence
  source: /note="Description of Artificial Sequence: Synthetic oligonucleotide"
  source: /note="Antisense strand to SEQ ID NO: 3177"
guuugcagaguacuagacg

SEQ ID NO: 3179 - RNA, 19 nt, Artificial Sequence
  source: /note="Description of Artificial Sequence: Synthetic oligonucleotide"
  source: /note="Sense strand starting at position 2031 of SEQ ID NO: 2951"
guccauugugcaggacaca

SEQ ID NO: 3180 - RNA, 19 nt, Artificial Sequence
  source: /note="Description of Artificial Sequence: Synthetic oligonucleotide"
  source: /note="Antisense strand to SEQ ID NO: 3179"
uguguccugcacaauggac

SEQ ID NO: 3181 - RNA, 19 nt, Artificial Sequence
  source: /note="Description of Artificial Sequence: Synthetic oligonucleotide"
  source: /note="Sense strand starting at position 2031 of SEQ ID NO: 2987"
guuuauuugaccuguggug

SEQ ID NO: 3182 - RNA, 19 nt, Artificial Sequence
  source: /note="Description of Artificial Sequence: Synthetic oligonucleotide"
  source: /note="Antisense strand to SEQ ID NO: 3181"
caccacaggucaaauaaac

SEQ ID NO: 3183 - RNA, 19 nt, Artificial Sequence
  source: /note="Description of Artificial Sequence: Synthetic oligonucleotide"
  source: /note="Sense strand starting at position 2031 of SEQ ID NO: 2989"
uuauuugaccuguggugua

SEQ ID NO: 3184 - RNA, 19 nt, Artificial Sequence
  source: /note="Description of Artificial Sequence: Synthetic oligonucleotide"
  source: /note="Antisense strand to SEQ ID NO: 3183"
uacaccacaggucaaauaa

SEQ ID NO: 3185 - RNA, 19 nt, Artificial Sequence
  source: /note="Description of Artificial Sequence: Synthetic oligonucleotide"
  source: /note="Sense strand starting at position 2031 of SEQ ID NO: 2994"
ugaccugugguguagguua

SEQ ID NO: 3186 - RNA, 19 nt, Artificial Sequence
  source: /note="Description of Artificial Sequence: Synthetic oligonucleotide"
  source: /note="Antisense strand to SEQ ID NO: 3185"
uaaccuacaccacagguca

SEQ ID NO: 3187 - RNA, 19 nt, Artificial Sequence
  source: /note="Description of Artificial Sequence: Synthetic oligonucleotide"
  source: /note="Sense strand starting at position 2031 of SEQ ID NO: 3027"
cugaguucuuaagaacacu

SEQ ID NO: 3188 - RNA, 19 nt, Artificial Sequence
  source: /note="Description of Artificial Sequence: Synthetic oligonucleotide"
  source: /note="Antisense strand to SEQ ID NO: 3187"
aguguucuuaagaacucag

SEQ ID NO: 3189 - RNA, 19 nt, Artificial Sequence
  source: /note="Description of Artificial Sequence: Synthetic oligonucleotide"
  source: /note="Sense strand starting at position 2031 of SEQ ID NO: 3118"
gagccagaggagugagauu

SEQ ID NO: 3190 - RNA, 19 nt, Artificial Sequence
  source: /note="Description of Artificial Sequence: Synthetic oligonucleotide"
  source: /note="Antisense strand to SEQ ID NO: 3189"
aaucucacuccucuggcuc

SEQ ID NO: 3191 - RNA, 19 nt, Artificial Sequence
  source: /note="Description of Artificial Sequence: Synthetic oligonucleotide"
  source: /note="Sense strand starting at position 2031 of SEQ ID NO: 3127"
gagugagauucccagagca

SEQ ID NO: 3192 - RNA, 19 nt, Artificial Sequence
  source: /note="Description of Artificial Sequence: Synthetic oligonucleotide"
  source: /note="Antisense strand to SEQ ID NO: 3191"
ugcucugggaaucucacuc

SEQ ID NO: 3193 - RNA, 19 nt, Artificial Sequence
  source: /note="Description of Artificial Sequence: Synthetic oligonucleotide"
  source: /note="Sense strand starting at position 2031 of SEQ ID NO: 3129"
gugagauucccagagcagg

SEQ ID NO: 3194 - RNA, 19 nt, Artificial Sequence
  source: /note="Description of Artificial Sequence: Synthetic oligonucleotide"
  source: /note="Antisense strand to SEQ ID NO: 3193"
ccugcucugggaaucucac

SEQ ID NO: 3195 - RNA, 19 nt, Artificial Sequence
  source: /note="Description of Artificial Sequence: Synthetic oligonucleotide"
  source: /note="Sense strand starting at position 2031 of SEQ ID NO: 3160"
gcuggucucucacaccuua

SEQ ID NO: 3196 - RNA, 19 nt, Artificial Sequence
  source: /note="Description of Artificial Sequence: Synthetic oligonucleotide"
  source: /note="Antisense strand to SEQ ID NO: 3195"
uaaggugugagagaccagc

SEQ ID NO: 3197 - RNA, 19 nt, Artificial Sequence
  source: /note="Description of Artificial Sequence: Synthetic oligonucleotide"
  source: /note="Sense strand starting at position 2031 of SEQ ID NO: 3219"
ucaaauggguguggugaaa

SEQ ID NO: 3198 - RNA, 19 nt, Artificial Sequence
  source: /note="Description of Artificial Sequence: Synthetic oligonucleotide"
  source: /note="Antisense strand to SEQ ID NO: 3197"
uuucaccacacccauuuga

SEQ ID NO: 3199 - RNA, 19 nt, Artificial Sequence
  source: /note="Description of Artificial Sequence: Synthetic oligonucleotide"
  source: /note="Sense strand starting at position 2031 of SEQ ID NO: 3587"
cuggaauguguagaucuga

SEQ ID NO: 3200 - RNA, 19 nt, Artificial Sequence
  source: /note="Description of Artificial Sequence: Synthetic oligonucleotide"
  source: /note="Antisense strand to SEQ ID NO: 3199"
ucagaucuacacauuccag

SEQ ID NO: 3201 - RNA, 19 nt, Artificial Sequence
  source: /note="Description of Artificial Sequence: Synthetic oligonucleotide"
  source: /note="Sense strand starting at position 2031 of SEQ ID NO: 3596"
guagaucugagcuguaaga

SEQ ID NO: 3202 - RNA, 19 nt, Artificial Sequence
  source: /note="Description of Artificial Sequence: Synthetic oligonucleotide"
  source: /note="Antisense strand to SEQ ID NO: 3201"
ucuuacagcucagaucuac

SEQ ID NO: 3203 - RNA, 19 nt, Artificial Sequence
  source: /note="Description of Artificial Sequence: Synthetic oligonucleotide"
  source: /note="Sense strand starting at position 2031 of SEQ ID NO: 3598"
agaucugagcuguaagagu

SEQ ID NO: 3204 - RNA, 19 nt, Artificial Sequence
  source: /note="Description of Artificial Sequence: Synthetic oligonucleotide"
  source: /note="Antisense strand to SEQ ID NO: 3203"
acucuuacagcucagaucu

SEQ ID NO: 3205 - RNA, 19 nt, Artificial Sequence
  source: /note="Description of Artificial Sequence: Synthetic oligonucleotide"
  source: /note="Sense strand starting at position 2031 of SEQ ID NO: 3609"
guaagaguuagccgggaga

SEQ ID NO: 3206 - RNA, 19 nt, Artificial Sequence
  source: /note="Description of Artificial Sequence: Synthetic oligonucleotide"
  source: /note="Antisense strand to SEQ ID NO: 3205"
ucucccggcuaacucuuac

SEQ ID NO: 3207 - RNA, 19 nt, Artificial Sequence
  source: /note="Description of Artificial Sequence: Synthetic oligonucleotide"
  source: /note="Sense strand starting at position 2031 of SEQ ID NO: 3611"
aagaguuagccgggagaaa

SEQ ID NO: 3208 - RNA, 19 nt, Artificial Sequence
  source: /note="Description of Artificial Sequence: Synthetic oligonucleotide"
  source: /note="Antisense strand to SEQ ID NO: 3207"
uuucucccggcuaacucuu

SEQ ID NO: 3209 - RNA, 19 nt, Artificial Sequence
  source: /note="Description of Artificial Sequence: Synthetic oligonucleotide"
  source: /note="Sense strand starting at position 2031 of SEQ ID NO: 3612"
agaguuagccgggagaaau

SEQ ID NO: 3210 - RNA, 19 nt, Artificial Sequence
  source: /note="Description of Artificial Sequence: Synthetic oligonucleotide"
  source: /note="Antisense strand to SEQ ID NO: 3209"
auuucucccggcuaacucu

SEQ ID NO: 3211 - RNA, 19 nt, Artificial Sequence
  source: /note="Description of Artificial Sequence: Synthetic oligonucleotide"
  source: /note="Sense strand starting at position 2031 of SEQ ID NO: 3742"
uggagagucaggugaguau

SEQ ID NO: 3212 - RNA, 19 nt, Artificial Sequence
  source: /note="Description of Artificial Sequence: Synthetic oligonucleotide"
  source: /note="Antisense strand to SEQ ID NO: 3211"
auacucaccugacucucca

SEQ ID NO: 3213 - RNA, 19 nt, Artificial Sequence
  source: /note="Description of Artificial Sequence: Synthetic oligonucleotide"
  source: /note="Sense strand starting at position 2031 of SEQ ID NO: 3752"
ggugaguauugcgggaucu

SEQ ID NO: 3214 - RNA, 19 nt, Artificial Sequence
  source: /note="Description of Artificial Sequence: Synthetic oligonucleotide"
  source: /note="Antisense strand to SEQ ID NO: 3213"
agaucccgcaauacucacc

SEQ ID NO: 3215 - RNA, 19 nt, Artificial Sequence
  source: /note="Description of Artificial Sequence: Synthetic oligonucleotide"
  source: /note="Sense strand starting at position 2031 of SEQ ID NO: 3753"
gugaguauugcgggaucug

SEQ ID NO: 3216 - RNA, 19 nt, Artificial Sequence
  source: /note="Description of Artificial Sequence: Synthetic oligonucleotide"
  source: /note="Antisense strand to SEQ ID NO: 3215"
cagaucccgcaauacucac

SEQ ID NO: 3217 - RNA, 19 nt, Artificial Sequence
  source: /note="Description of Artificial Sequence: Synthetic oligonucleotide"
  source: /note="Sense strand starting at position 2032 of SEQ ID NO: 649"
acacgauuaucuggaagga

SEQ ID NO: 3218 - RNA, 19 nt, Artificial Sequence
  source: /note="Description of Artificial Sequence: Synthetic oligonucleotide"
  source: /note="Antisense strand to SEQ ID NO: 3217"
uccuuccagauaaucgugu

SEQ ID NO: 3219 - RNA, 19 nt, Artificial Sequence
  source: /note="Description of Artificial Sequence: Synthetic oligonucleotide"
  source: /note="Sense strand starting at position 2032 of SEQ ID NO: 1591"
gcgcuuguccgaccucaca

SEQ ID NO: 3220 - RNA, 19 nt, Artificial Sequence
  source: /note="Description of Artificial Sequence: Synthetic oligonucleotide"
  source: /note="Antisense strand to SEQ ID NO: 3219"
ugugaggucggacaagcgc

SEQ ID NO: 3221 - RNA, 19 nt, Artificial Sequence
  source: /note="Description of Artificial Sequence: Synthetic oligonucleotide"
  source: /note="Sense strand starting at position 2032 of SEQ ID NO: 1717"
ggaugcugguuucuagaag

SEQ ID NO: 3222 - RNA, 19 nt, Artificial Sequence
  source: /note="Description of Artificial Sequence: Synthetic oligonucleotide"
  source: /note="Antisense strand to SEQ ID NO: 3221"
cuucuagaaaccagcaucc

SEQ ID NO: 3223 - RNA, 19 nt, Artificial Sequence
  source: /note="Description of Artificial Sequence: Synthetic oligonucleotide"
  source: /note="Sense strand starting at position 2032 of SEQ ID NO: 1848"
ccaccaaguuuauggagaa

SEQ ID NO: 3224 - RNA, 19 nt, Artificial Sequence
  source: /note="Description of Artificial Sequence: Synthetic oligonucleotide"
  source: /note="Antisense strand to SEQ ID NO: 3223"
uucuccauaaacuuggugg

SEQ ID NO: 3225 - RNA, 19 nt, Artificial Sequence
  source: /note="Description of Artificial Sequence: Synthetic oligonucleotide"
  source: /note="Sense strand starting at position 2032 of SEQ ID NO: 1849"
caccaaguuuauggagaaa

SEQ ID NO: 3226 - RNA, 19 nt, Artificial Sequence
  source: /note="Description of Artificial Sequence: Synthetic oligonucleotide"
  source: /note="Antisense strand to SEQ ID NO: 3225"
uuucuccauaaacuuggug

SEQ ID NO: 3227 - RNA, 19 nt, Artificial Sequence
  source: /note="Description of Artificial Sequence: Synthetic oligonucleotide"
  source: /note="Sense strand starting at position 2032 of SEQ ID NO: 1993"
gggacugacgggcaaaguu

SEQ ID NO: 3228 - RNA, 19 nt, Artificial Sequence
  source: /note="Description of Artificial Sequence: Synthetic oligonucleotide"
  source: /note="Antisense strand to SEQ ID NO: 3227"
aacuuugcccgucaguccc

SEQ ID NO: 3229 - RNA, 19 nt, Artificial Sequence
  source: /note="Description of Artificial Sequence: Synthetic oligonucleotide"
  source: /note="Sense strand starting at position 2032 of SEQ ID NO: 2269"
ccuaauguaaguugggaaa

SEQ ID NO: 3230 - RNA, 19 nt, Artificial Sequence
  source: /note="Description of Artificial Sequence: Synthetic oligonucleotide"
  source: /note="Antisense strand to SEQ ID NO: 3229"
uuucccaacuuacauuagg

SEQ ID NO: 3231 - RNA, 19 nt, Artificial Sequence
  source: /note="Description of Artificial Sequence: Synthetic oligonucleotide"
  source: /note="Sense strand starting at position 2032 of SEQ ID NO: 2271"
uaauguaaguugggaaaca

SEQ ID NO: 3232 - RNA, 19 nt, Artificial Sequence
  source: /note="Description of Artificial Sequence: Synthetic oligonucleotide"
  source: /note="Antisense strand to SEQ ID NO: 3231"
uguuucccaacuuacauua

SEQ ID NO: 3233 - RNA, 19 nt, Artificial Sequence
  source: /note="Description of Artificial Sequence: Synthetic oligonucleotide"
  source: /note="Sense strand starting at position 2032 of SEQ ID NO: 2319"
auagcaaucaugcgaguca

SEQ ID NO: 3234 - RNA, 19 nt, Artificial Sequence
  source: /note="Description of Artificial Sequence: Synthetic oligonucleotide"
  source: /note="Antisense strand to SEQ ID NO: 3233"
ugacucgcaugauugcuau

SEQ ID NO: 3235 - RNA, 19 nt, Artificial Sequence
  source: /note="Description of Artificial Sequence: Synthetic oligonucleotide"
  source: /note="Sense strand starting at position 2032 of SEQ ID NO: 2320"
uagcaaucaugcgagucaa

SEQ ID NO: 3236 - RNA, 19 nt, Artificial Sequence
  source: /note="Description of Artificial Sequence: Synthetic oligonucleotide"
  source: /note="Antisense strand to SEQ ID NO: 3235"
uugacucgcaugauugcua

SEQ ID NO: 3237 - RNA, 19 nt, Artificial Sequence
  source: /note="Description of Artificial Sequence: Synthetic oligonucleotide"
  source: /note="Sense strand starting at position 2032 of SEQ ID NO: 2331"
cgagucaaaucucaagacu

SEQ ID NO: 3238 - RNA, 19 nt, Artificial Sequence
  source: /note="Description of Artificial Sequence: Synthetic oligonucleotide"
  source: /note="Antisense strand to SEQ ID NO: 3237"
agucuugagauuugacucg

SEQ ID NO: 3239 - RNA, 19 nt, Artificial Sequence
  source: /note="Description of Artificial Sequence: Synthetic oligonucleotide"
  source: /note="Sense strand starting at position 2032 of SEQ ID NO: 2334"
gucaaaucucaagacugua

SEQ ID NO: 3240 - RNA, 19 nt, Artificial Sequence
  source: /note="Description of Artificial Sequence: Synthetic oligonucleotide"
  source: /note="Antisense strand to SEQ ID NO: 3239"
uacagucuugagauuugac

SEQ ID NO: 3241 - RNA, 19 nt, Artificial Sequence
  source: /note="Description of Artificial Sequence: Synthetic oligonucleotide"
  source: /note="Sense strand starting at position 2032 of SEQ ID NO: 2348"
cuguaucuuggguguggau

SEQ ID NO: 3242 - RNA, 19 nt, Artificial Sequence
  source: /note="Description of Artificial Sequence: Synthetic oligonucleotide"
  source: /note="Antisense strand to SEQ ID NO: 3241"
auccacacccaagauacag

SEQ ID NO: 3243 - RNA, 19 nt, Artificial Sequence
  source: /note="Description of Artificial Sequence: Synthetic oligonucleotide"
  source: /note="Sense strand starting at position 2032 of SEQ ID NO: 2418"
aagggaggcugguuucuua

SEQ ID NO: 3244 - RNA, 19 nt, Artificial Sequence
  source: /note="Description of Artificial Sequence: Synthetic oligonucleotide"
  source: /note="Antisense strand to SEQ ID NO: 3243"
uaagaaaccagccucccuu

SEQ ID NO: 3245 - RNA, 19 nt, Artificial Sequence
  source: /note="Description of Artificial Sequence: Synthetic oligonucleotide"
  source: /note="Sense strand starting at position 2032 of SEQ ID NO: 2427"
ugguuucuuaggugagcca

SEQ ID NO: 3246 - RNA, 19 nt, Artificial Sequence
  source: /note="Description of Artificial Sequence: Synthetic oligonucleotide"
  source: /note="Antisense strand to SEQ ID NO: 3245"
uggcucaccuaagaaacca

SEQ ID NO: 3247 - RNA, 19 nt, Artificial Sequence
  source: /note="Description of Artificial Sequence: Synthetic oligonucleotide"
  source: /note="Sense strand starting at position 2032 of SEQ ID NO: 2456"
cugagaagugccgggaaua

SEQ ID NO: 3248 - RNA, 19 nt, Artificial Sequence
  source: /note="Description of Artificial Sequence: Synthetic oligonucleotide"
  source: /note="Antisense strand to SEQ ID NO: 3247"
uauucccggcacuucucag

SEQ ID NO: 3249 - RNA, 19 nt, Artificial Sequence
  source: /note="Description of Artificial Sequence: Synthetic oligonucleotide"
  source: /note="Sense strand starting at position 2032 of SEQ ID NO: 2457"
ugagaagugccgggaauag

SEQ ID NO: 3250 - RNA, 19 nt, Artificial Sequence
  source: /note="Description of Artificial Sequence: Synthetic oligonucleotide"
  source: /note="Antisense strand to SEQ ID NO: 3249"
cuauucccggcacuucuca

SEQ ID NO: 3251 - RNA, 19 nt, Artificial Sequence
  source: /note="Description of Artificial Sequence: Synthetic oligonucleotide"
  source: /note="Sense strand starting at position 2032 of SEQ ID NO: 2475"
ggaucauucuggcccugag

SEQ ID NO: 3252 - RNA, 19 nt, Artificial Sequence
  source: /note="Description of Artificial Sequence: Synthetic oligonucleotide"
  source: /note="Antisense strand to SEQ ID NO: 3251"
cucagggccagaaugaucc

SEQ ID NO: 3253 - RNA, 19 nt, Artificial Sequence
  source: /note="Description of Artificial Sequence: Synthetic oligonucleotide"
  source: /note="Sense strand starting at position 2032 of SEQ ID NO: 2962"
gacugaggguucucagaau

SEQ ID NO: 3254 - RNA, 19 nt, Artificial Sequence
  source: /note="Description of Artificial Sequence: Synthetic oligonucleotide"
  source: /note="Antisense strand to SEQ ID NO: 3253"
auucugagaacccucaguc

SEQ ID NO: 3255 - RNA, 19 nt, Artificial Sequence
  source: /note="Description of Artificial Sequence: Synthetic oligonucleotide"
  source: /note="Sense strand starting at position 2032 of SEQ ID NO: 2968"
ggguucucagaauguggaa

SEQ ID NO: 3256 - RNA, 19 nt, Artificial Sequence
  source: /note="Description of Artificial Sequence: Synthetic oligonucleotide"
  source: /note="Antisense strand to SEQ ID NO: 3255"
uuccacauucugagaaccc

SEQ ID NO: 3257 - RNA, 19 nt, Artificial Sequence
  source: /note="Description of Artificial Sequence: Synthetic oligonucleotide"
  source: /note="Sense strand starting at position 2032 of SEQ ID NO: 3066"
cagggaguauccuccaugu

SEQ ID NO: 3258 - RNA, 19 nt, Artificial Sequence
  source: /note="Description of Artificial Sequence: Synthetic oligonucleotide"
  source: /note="Antisense strand to SEQ ID NO: 3257"
acauggaggauacucccug

SEQ ID NO: 3259 - RNA, 19 nt, Artificial Sequence
  source: /note="Description of Artificial Sequence: Synthetic oligonucleotide"
  source: /note="Sense strand starting at position 2032 of SEQ ID NO: 3068"
gggaguauccuccauguga

SEQ ID NO: 3260 - RNA, 19 nt, Artificial Sequence
  source: /note="Description of Artificial Sequence: Synthetic oligonucleotide"
  source: /note="Antisense strand to SEQ ID NO: 3259"
ucacauggaggauacuccc

SEQ ID NO: 3261 - RNA, 19 nt, Artificial Sequence
  source: /note="Description of Artificial Sequence: Synthetic oligonucleotide"
  source: /note="Sense strand starting at position 2032 of SEQ ID NO: 3070"
gaguauccuccaugugaac

SEQ ID NO: 3262 - RNA, 19 nt, Artificial Sequence
  source: /note="Description of Artificial Sequence: Synthetic oligonucleotide"
  source: /note="Antisense strand to SEQ ID NO: 3261"
guucacauggaggauacuc

SEQ ID NO: 3263 - RNA, 19 nt, Artificial Sequence
  source: /note="Description of Artificial Sequence: Synthetic oligonucleotide"
  source: /note="Sense strand starting at position 2032 of SEQ ID NO: 3098"
gcugaugacuucuuuggaa

SEQ ID NO: 3264 - RNA, 19 nt, Artificial Sequence
  source: /note="Description of Artificial Sequence: Synthetic oligonucleotide"
  source: /note="Antisense strand to SEQ ID NO: 3263"
uuccaaagaagucaucagc

SEQ ID NO: 3265 - RNA, 19 nt, Artificial Sequence
  source: /note="Description of Artificial Sequence: Synthetic oligonucleotide"
  source: /note="Sense strand starting at position 2032 of SEQ ID NO: 3101"
gaugacuucuuuggaagcu

SEQ ID NO: 3266 - RNA, 19 nt, Artificial Sequence
  source: /note="Description of Artificial Sequence: Synthetic oligonucleotide"
  source: /note="Antisense strand to SEQ ID NO: 3265"
agcuuccaaagaagucauc

SEQ ID NO: 3267 - RNA, 19 nt, Artificial Sequence
  source: /note="Description of Artificial Sequence: Synthetic oligonucleotide"
  source: /note="Sense strand starting at position 2032 of SEQ ID NO: 3151"
ggaggugauuccuucccaa

SEQ ID NO: 3268 - RNA, 19 nt, Artificial Sequence
  source: /note="Description of Artificial Sequence: Synthetic oligonucleotide"
  source: /note="Antisense strand to SEQ ID NO: 3267"
uugggaaggaaucaccucc

SEQ ID NO: 3269 - RNA, 19 nt, Artificial Sequence
  source: /note="Description of Artificial Sequence: Synthetic oligonucleotide"
  source: /note="Sense strand starting at position 2032 of SEQ ID NO: 3154"
ggugauuccuucccaacag

SEQ ID NO: 3270 - RNA, 19 nt, Artificial Sequence
  source: /note="Description of Artificial Sequence: Synthetic oligonucleotide"
  source: /note="Antisense strand to SEQ ID NO: 3269"
cuguugggaaggaaucacc

SEQ ID NO: 3271 - RNA, 19 nt, Artificial Sequence
  source: /note="Description of Artificial Sequence: Synthetic oligonucleotide"
  source: /note="Sense strand starting at position 2032 of SEQ ID NO: 3346"
uaucgaucccagggagauc

SEQ ID NO: 3272 - RNA, 19 nt, Artificial Sequence
  source: /note="Description of Artificial Sequence: Synthetic oligonucleotide"
  source: /note="Antisense strand to SEQ ID NO: 3271"
gaucucccugggaucgaua

SEQ ID NO: 3273 - RNA, 19 nt, Artificial Sequence
  source: /note="Description of Artificial Sequence: Synthetic oligonucleotide"
  source: /note="Sense strand starting at position 2032 of SEQ ID NO: 3358"
ggagaucgcuuacaaagua

SEQ ID NO: 3274 - RNA, 19 nt, Artificial Sequence
  source: /note="Description of Artificial Sequence: Synthetic oligonucleotide"
  source: /note="Antisense strand to SEQ ID NO: 3273"
uacuuuguaagcgaucucc

SEQ ID NO: 3275 - RNA, 19 nt, Artificial Sequence
  source: /note="Description of Artificial Sequence: Synthetic oligonucleotide"
  source: /note="Sense strand starting at position 2032 of SEQ ID NO: 3374"
guagcugcuccgucuggaa

SEQ ID NO: 3276 - RNA, 19 nt, Artificial Sequence
  source: /note="Description of Artificial Sequence: Synthetic oligonucleotide"
  source: /note="Antisense strand to SEQ ID NO: 3275"
uuccagacggagcagcuac

SEQ ID NO: 3277 - RNA, 19 nt, Artificial Sequence
  source: /note="Description of Artificial Sequence: Synthetic oligonucleotide"
  source: /note="Sense strand starting at position 2032 of SEQ ID NO: 3376"
agcugcuccgucuggaaua

SEQ ID NO: 3278 - RNA, 19 nt, Artificial Sequence
  source: /note="Description of Artificial Sequence: Synthetic oligonucleotide"
  source: /note="Antisense strand to SEQ ID NO: 3277"
uauuccagacggagcagcu

SEQ ID NO: 3279 - RNA, 19 nt, Artificial Sequence
  source: /note="Description of Artificial Sequence: Synthetic oligonucleotide"
  source: /note="Sense strand starting at position 2032 of SEQ ID NO: 3377"
gcugcuccgucuggaauaa

SEQ ID NO: 3280 - RNA, 19 nt, Artificial Sequence
  source: /note="Description of Artificial Sequence: Synthetic oligonucleotide"
  source: /note="Antisense strand to SEQ ID NO: 3279"
uuauuccagacggagcagc

SEQ ID NO: 3281 - RNA, 19 nt, Artificial Sequence
  source: /note="Description of Artificial Sequence: Synthetic oligonucleotide"
  source: /note="Sense strand starting at position 2032 of SEQ ID NO: 3378"
cugcuccgucuggaauaaa

SEQ ID NO: 3282 - RNA, 19 nt, Artificial Sequence
  source: /note="Description of Artificial Sequence: Synthetic oligonucleotide"
  source: /note="Antisense strand to SEQ ID NO: 3281"
uuuauuccagacggagcag

SEQ ID NO: 3283 - RNA, 19 nt, Artificial Sequence
  source: /note="Description of Artificial Sequence: Synthetic oligonucleotide"
  source: /note="Sense strand starting at position 2032 of SEQ ID NO: 3520"
gcuggcuggucuuagggua

SEQ ID NO: 3284 - RNA, 19 nt, Artificial Sequence
  source: /note="Description of Artificial Sequence: Synthetic oligonucleotide"
  source: /note="Antisense strand to SEQ ID NO: 3283"
uacccuaagaccagccagc

SEQ ID NO: 3285 - RNA, 19 nt, Artificial Sequence
  source: /note="Description of Artificial Sequence: Synthetic oligonucleotide"
  source: /note="Sense strand starting at position 2032 of SEQ ID NO: 3813"
ugguguggguccuugagga

SEQ ID NO: 3286 - RNA, 19 nt, Artificial Sequence
  source: /note="Description of Artificial Sequence: Synthetic oligonucleotide"
  source: /note="Antisense strand to SEQ ID NO: 3285"
uccucaaggacccacacca

SEQ ID NO: 3287 - RNA, 19 nt, Artificial Sequence
  source: /note="Description of Artificial Sequence: Synthetic oligonucleotide"
  source: /note="Sense strand starting at position 2034 of SEQ ID NO: 1405"
gcagucucuccgggugaca

SEQ ID NO: 3288 - RNA, 19 nt, Artificial Sequence
  source: /note="Description of Artificial Sequence: Synthetic oligonucleotide"
  source: /note="Antisense strand to SEQ ID NO: 3287"
ugucacccggagagacugc

SEQ ID NO: 3289 - RNA, 19 nt, Artificial Sequence
  source: /note="Description of Artificial Sequence: Synthetic oligonucleotide"
  source: /note="Sense strand starting at position 2034 of SEQ ID NO: 1684"
ucuagaaaugcgcagacau

SEQ ID NO: 3290 - RNA, 19 nt, Artificial Sequence
  source: /note="Description of Artificial Sequence: Synthetic oligonucleotide"
  source: /note="Antisense strand to SEQ ID NO: 3289"
augucugcgcauuucuaga

SEQ ID NO: 3291 - RNA, 19 nt, Artificial Sequence
  source: /note="Description of Artificial Sequence: Synthetic oligonucleotide"
  source: /note="Sense strand starting at position 2034 of SEQ ID NO: 1713"
ucacgaguuucguuugggu

SEQ ID NO: 3292 - RNA, 19 nt, Artificial Sequence
  source: /note="Description of Artificial Sequence: Synthetic oligonucleotide"
  source: /note="Antisense strand to SEQ ID NO: 3291"
acccaaacgaaacucguga

SEQ ID NO: 3293 - RNA, 19 nt, Artificial Sequence
  source: /note="Description of Artificial Sequence: Synthetic oligonucleotide"
  source: /note="Sense strand starting at position 2034 of SEQ ID NO: 1715"
acgaguuucguuuggguca

SEQ ID NO: 3294 - RNA, 19 nt, Artificial Sequence
  source: /note="Description of Artificial Sequence: Synthetic oligonucleotide"
  source: /note="Antisense strand to SEQ ID NO: 3293"
ugacccaaacgaaacucgu

SEQ ID NO: 3295 - RNA, 19 nt, Artificial Sequence
  source: /note="Description of Artificial Sequence: Synthetic oligonucleotide"
  source: /note="Sense strand starting at position 2034 of SEQ ID NO: 1716"
cgaguuucguuugggucau

SEQ ID NO: 3296 - RNA, 19 nt, Artificial Sequence
  source: /note="Description of Artificial Sequence: Synthetic oligonucleotide"
  source: /note="Antisense strand to SEQ ID NO: 3295"
augacccaaacgaaacucg

SEQ ID NO: 3297 - RNA, 19 nt, Artificial Sequence
  source: /note="Description of Artificial Sequence: Synthetic oligonucleotide"
  source: /note="Sense strand starting at position 2033 of SEQ ID NO: 153"
auacuucgaugguagaaau

SEQ ID NO: 3298 - RNA, 19 nt, Artificial Sequence
  source: /note="Description of Artificial Sequence: Synthetic oligonucleotide"
  source: /note="Antisense strand to SEQ ID NO: 3297"
auuucuaccaucgaaguau

SEQ ID NO: 3299 - RNA, 19 nt, Artificial Sequence
  source: /note="Description of Artificial Sequence: Synthetic oligonucleotide"
  source: /note="Sense strand starting at position 2033 of SEQ ID NO: 275"
accaguauguaaugauaua

SEQ ID NO: 3300 - RNA, 19 nt, Artificial Sequence
  source: /note="Description of Artificial Sequence: Synthetic oligonucleotide"
  source: /note="Antisense strand to SEQ ID NO: 3299"
uauaucauuacauacuggu

SEQ ID NO: 3301 - RNA, 19 nt, Artificial Sequence
  source: /note="Description of Artificial Sequence: Synthetic oligonucleotide"
  source: /note="Sense strand starting at position 2033 of SEQ ID NO: 332"
ugacuaaauugugauacag

SEQ ID NO: 3302 - RNA, 19 nt, Artificial Sequence
  source: /note="Description of Artificial Sequence: Synthetic oligonucleotide"
  source: /note="Antisense strand to SEQ ID NO: 3301"
cuguaucacaauuuaguca

SEQ ID NO: 3303 - RNA, 19 nt, Artificial Sequence
  source: /note="Description of Artificial Sequence: Synthetic oligonucleotide"
  source: /note="Sense strand starting at position 2033 of SEQ ID NO: 402"
ccaauugacuuagaguucu

SEQ ID NO: 3304 - RNA, 19 nt, Artificial Sequence
  source: /note="Description of Artificial Sequence: Synthetic oligonucleotide"
  source: /note="Antisense strand to SEQ ID NO: 3303"
agaacucuaagucaauugg

SEQ ID NO: 3305 - RNA, 19 nt, Artificial Sequence
  source: /note="Description of Artificial Sequence: Synthetic oligonucleotide"
  source: /note="Sense strand starting at position 2033 of SEQ ID NO: 408"
gacuuagaguucuaguacg

SEQ ID NO: 3306 - RNA, 19 nt, Artificial Sequence
  source: /note="Description of Artificial Sequence: Synthetic oligonucleotide"
  source: /note="Antisense strand to SEQ ID NO: 3305"
cguacuagaacucuaaguc

SEQ ID NO: 3307 - RNA, 19 nt, Artificial Sequence
  source: /note="Description of Artificial Sequence: Synthetic oligonucleotide"
  source: /note="Sense strand starting at position 2033 of SEQ ID NO: 413"
agaguucuaguacguguua

SEQ ID NO: 3308 - RNA, 19 nt, Artificial Sequence
  source: /note="Description of Artificial Sequence: Synthetic oligonucleotide"
  source: /note="Antisense strand to SEQ ID NO: 3307"
uaacacguacuagaacucu

SEQ ID NO: 3309 - RNA, 19 nt, Artificial Sequence
  source: /note="Description of Artificial Sequence: Synthetic oligonucleotide"
  source: /note="Sense strand starting at position 2033 of SEQ ID NO: 414"
gaguucuaguacguguuaa

SEQ ID NO: 3310 - RNA, 19 nt, Artificial Sequence
  source: /note="Description of Artificial Sequence: Synthetic oligonucleotide"
  source: /note="Antisense strand to SEQ ID NO: 3309"
uuaacacguacuagaacuc

SEQ ID NO: 3311 - RNA, 19 nt, Artificial Sequence
  source: /note="Description of Artificial Sequence: Synthetic oligonucleotide"
  source: /note="Sense strand starting at position 2033 of SEQ ID NO: 415"
aguucuaguacguguuaau

SEQ ID NO: 3312 - RNA, 19 nt, Artificial Sequence
  source: /note="Description of Artificial Sequence: Synthetic oligonucleotide"
  source: /note="Antisense strand to SEQ ID NO: 3311"
auuaacacguacuagaacu

SEQ ID NO: 3313 - RNA, 19 nt, Artificial Sequence
  source: /note="Description of Artificial Sequence: Synthetic oligonucleotide"
  source: /note="Sense strand starting at position 2033 of SEQ ID NO: 418"
ucuaguacguguuaaugag

SEQ ID NO: 3314 - RNA, 19 nt, Artificial Sequence
  source: /note="Description of Artificial Sequence: Synthetic oligonucleotide"
  source: /note="Antisense strand to SEQ ID NO: 3313"
cucauuaacacguacuaga

SEQ ID NO: 3315 - RNA, 19 nt, Artificial Sequence
  source: /note="Description of Artificial Sequence: Synthetic oligonucleotide"
  source: /note="Sense strand starting at position 2033 of SEQ ID NO: 428"
guuaaugagugagaaaugu

SEQ ID NO: 3316 - RNA, 19 nt, Artificial Sequence
  source: /note="Description of Artificial Sequence: Synthetic oligonucleotide"
  source: /note="Antisense strand to SEQ ID NO: 3315"
acauuucucacucauuaac

SEQ ID NO: 3317 - RNA, 19 nt, Artificial Sequence
  source: /note="Description of Artificial Sequence: Synthetic oligonucleotide"
  source: /note="Sense strand starting at position 2033 of SEQ ID NO: 817"
agcagaaacugaugcaaca

SEQ ID NO: 3318 - RNA, 19 nt, Artificial Sequence
  source: /note="Description of Artificial Sequence: Synthetic oligonucleotide"
  source: /note="Antisense strand to SEQ ID NO: 3317"
uguugcaucaguuucugcu

SEQ ID NO: 3319 - RNA, 19 nt, Artificial Sequence
  source: /note="Description of Artificial Sequence: Synthetic oligonucleotide"
  source: /note="Sense strand starting at position 2033 of SEQ ID NO: 1008"
aggagacucuuacauaacu

SEQ ID NO: 3320 - RNA, 19 nt, Artificial Sequence
  source: /note="Description of Artificial Sequence: Synthetic oligonucleotide"
  source: /note="Antisense strand to SEQ ID NO: 3319"
aguuauguaagagucuccu

SEQ ID NO: 3321 - RNA, 19 nt, Artificial Sequence
  source: /note="Description of Artificial Sequence: Synthetic oligonucleotide"
  source: /note="Sense strand starting at position 2033 of SEQ ID NO: 1041"
uaucaaaucuagggacagu

SEQ ID NO: 3322 - RNA, 19 nt, Artificial Sequence
  source: /note="Description of Artificial Sequence: Synthetic oligonucleotide"
  source: /note="Antisense strand to SEQ ID NO: 3321"
acugucccuagauuugaua

SEQ ID NO: 3323 - RNA, 19 nt, Artificial Sequence
  source: /note="Description of Artificial Sequence: Synthetic oligonucleotide"
  source: /note="Sense strand starting at position 2033 of SEQ ID NO: 1062"
auugcuuucuaugaaagua

SEQ ID NO: 3324 - RNA, 19 nt, Artificial Sequence
  source: /note="Description of Artificial Sequence: Synthetic oligonucleotide"
  source: /note="Antisense strand to SEQ ID NO: 3323"
uacuuucauagaaagcaau

SEQ ID NO: 3325 - RNA, 19 nt, Artificial Sequence
  source: /note="Description of Artificial Sequence: Synthetic oligonucleotide"
  source: /note="Sense strand starting at position 2033 of SEQ ID NO: 1127"
ugaaucaacugaugaccau

SEQ ID NO: 3326 - RNA, 19 nt, Artificial Sequence
  source: /note="Description of Artificial Sequence: Synthetic oligonucleotide"
  source: /note="Antisense strand to SEQ ID NO: 3325"
auggucaucaguugauuca

SEQ ID NO: 3327 - RNA, 19 nt, Artificial Sequence
  source: /note="Description of Artificial Sequence: Synthetic oligonucleotide"
  source: /note="Sense strand starting at position 2033 of SEQ ID NO: 1417"
gucucuagauucuggagga

SEQ ID NO: 3328 - RNA, 19 nt, Artificial Sequence
  source: /note="Description of Artificial Sequence: Synthetic oligonucleotide"
  source: /note="Antisense strand to SEQ ID NO: 3327"
uccuccagaaucuagagac

SEQ ID NO: 3329 - RNA, 19 nt, Artificial Sequence
  source: /note="Description of Artificial Sequence: Synthetic oligonucleotide"
  source: /note="Sense strand starting at position 2033 of SEQ ID NO: 1484"
acaaauaggucagaccuau

SEQ ID NO: 3330 - RNA, 19 nt, Artificial Sequence
  source: /note="Description of Artificial Sequence: Synthetic oligonucleotide"
  source: /note="Antisense strand to SEQ ID NO: 3329"
auaggucugaccuauuugu

SEQ ID NO: 3331 - RNA, 19 nt, Artificial Sequence
  source: /note="Description of Artificial Sequence: Synthetic oligonucleotide"
  source: /note="Sense strand starting at position 2033 of SEQ ID NO: 1720"
ugcauauagucccaugaca

SEQ ID NO: 3332 - RNA, 19 nt, Artificial Sequence
  source: /note="Description of Artificial Sequence: Synthetic oligonucleotide"
  source: /note="Antisense strand to SEQ ID NO: 3331"
ugucaugggacuauaugca

SEQ ID NO: 3333 - RNA, 19 nt, Artificial Sequence
  source: /note="Description of Artificial Sequence: Synthetic oligonucleotide"
  source: /note="Sense strand starting at position 2033 of SEQ ID NO: 1755"
guaguaucuucugguggca

SEQ ID NO: 3334 - RNA, 19 nt, Artificial Sequence
  source: /note="Description of Artificial Sequence: Synthetic oligonucleotide"
  source: /note="Antisense strand to SEQ ID NO: 3333"
ugccaccagaagauacuac

SEQ ID NO: 3335 - RNA, 19 nt, Artificial Sequence
  source: /note="Description of Artificial Sequence: Synthetic oligonucleotide"
  source: /note="Sense strand starting at position 2033 of SEQ ID NO: 1758"
guaucuucugguggcacua

SEQ ID NO: 3336 - RNA, 19 nt, Artificial Sequence
  source: /note="Description of Artificial Sequence: Synthetic oligonucleotide"
  source: /note="Antisense strand to SEQ ID NO: 3335"
uagugccaccagaagauac

SEQ ID NO: 3337 - RNA, 19 nt, Artificial Sequence
  source: /note="Description of Artificial Sequence: Synthetic oligonucleotide"
  source: /note="Sense strand starting at position 2033 of SEQ ID NO: 1815"
gagcucuauuugcaugacu

SEQ ID NO: 3338 - RNA, 19 nt, Artificial Sequence
  source: /note="Description of Artificial Sequence: Synthetic oligonucleotide"
  source: /note="Antisense strand to SEQ ID NO: 3337"
agucaugcaaauagagcuc

SEQ ID NO: 3339 - RNA, 19 nt, Artificial Sequence
  source: /note="Description of Artificial Sequence: Synthetic oligonucleotide"
  source: /note="Sense strand starting at position 2033 of SEQ ID NO: 1941"
ccaauuucuuugcagagca

SEQ ID NO: 3340 - RNA, 19 nt, Artificial Sequence
  source: /note="Description of Artificial Sequence: Synthetic oligonucleotide"
  source: /note="Antisense strand to SEQ ID NO: 3339"
ugcucugcaaagaaauugg

SEQ ID NO: 3341 - RNA, 19 nt, Artificial Sequence
  source: /note="Description of Artificial Sequence: Synthetic oligonucleotide"
  source: /note="Sense strand starting at position 2033 of SEQ ID NO: 2067"
aagggaggcugcuaaacuu

SEQ ID NO: 3342 - RNA, 19 nt, Artificial Sequence
  source: /note="Description of Artificial Sequence: Synthetic oligonucleotide"
  source: /note="Antisense strand to SEQ ID NO: 3341"
aaguuuagcagccucccuu

SEQ ID NO: 3343 - RNA, 19 nt, Artificial Sequence
  source: /note="Description of Artificial Sequence: Synthetic oligonucleotide"
  source: /note="Sense strand starting at position 2033 of SEQ ID NO: 2114"
gcauaagucugcuuuaauc

SEQ ID NO: 3344 - RNA, 19 nt, Artificial Sequence
  source: /note="Description of Artificial Sequence: Synthetic oligonucleotide"
  source: /note="Antisense strand to SEQ ID NO: 3343"
gauuaaagcagacuuaugc

SEQ ID NO: 3345 - RNA, 19 nt, Artificial Sequence
  source: /note="Description of Artificial Sequence: Synthetic oligonucleotide"
  source: /note="Sense strand starting at position 2033 of SEQ ID NO: 2243"
aagagaaguucuggauguu

SEQ ID NO: 3346 - RNA, 19 nt, Artificial Sequence
  source: /note="Description of Artificial Sequence: Synthetic oligonucleotide"
  source: /note="Antisense strand to SEQ ID NO: 3345"
aacauccagaacuucucuu

SEQ ID NO: 3347 - RNA, 19 nt, Artificial Sequence
  source: /note="Description of Artificial Sequence: Synthetic oligonucleotide"
  source: /note="Sense strand starting at position 2033 of SEQ ID NO: 2249"
aguucuggauguugucgaa

SEQ ID NO: 3348 - RNA, 19 nt, Artificial Sequence
  source: /note="Description of Artificial Sequence: Synthetic oligonucleotide"
  source: /note="Antisense strand to SEQ ID NO: 3347"
uucgacaacauccagaacu

SEQ ID NO: 3349 - RNA, 19 nt, Artificial Sequence
  source: /note="Description of Artificial Sequence: Synthetic oligonucleotide"
  source: /note="Sense strand starting at position 2033 of SEQ ID NO: 2252"
ucuggauguugucgaagau

SEQ ID NO: 3350 - RNA, 19 nt, Artificial Sequence
  source: /note="Description of Artificial Sequence: Synthetic oligonucleotide"
  source: /note="Antisense strand to SEQ ID NO: 3349"
aucuucgacaacauccaga

SEQ ID NO: 3351 - RNA, 19 nt, Artificial Sequence
  source: /note="Description of Artificial Sequence: Synthetic oligonucleotide"
  source: /note="Sense strand starting at position 2033 of SEQ ID NO: 2261"
ugucgaagauucuagaauu

SEQ ID NO: 3352 - RNA, 19 nt, Artificial Sequence
  source: /note="Description of Artificial Sequence: Synthetic oligonucleotide"
  source: /note="Antisense strand to SEQ ID NO: 3351"
aauucuagaaucuucgaca

SEQ ID NO: 3353 - RNA, 19 nt, Artificial Sequence
  source: /note="Description of Artificial Sequence: Synthetic oligonucleotide"
  source: /note="Sense strand starting at position 2033 of SEQ ID NO: 2309"
cuguuagucucucugcuuu

SEQ ID NO: 3354 - RNA, 19 nt, Artificial Sequence
  source: /note="Description of Artificial Sequence: Synthetic oligonucleotide"
  source: /note="Antisense strand to SEQ ID NO: 3353"
aaagcagagagacuaacag

SEQ ID NO: 3355 - RNA, 19 nt, Artificial Sequence
  source: /note="Description of Artificial Sequence: Synthetic oligonucleotide"
  source: /note="Sense strand starting at position 2033 of SEQ ID NO: 2348"
cugccaguaugaggaauuu

SEQ ID NO: 3356 - RNA, 19 nt, Artificial Sequence
  source: /note="Description of Artificial Sequence: Synthetic oligonucleotide"
  source: /note="Antisense strand to SEQ ID NO: 3355"
aaauuccucauacuggcag

SEQ ID NO: 3357 - RNA, 19 nt, Artificial Sequence
  source: /note="Description of Artificial Sequence: Synthetic oligonucleotide"
  source: /note="Sense strand starting at position 2033 of SEQ ID NO: 2457"
uaaagcgaguccugucacu

SEQ ID NO: 3358 - RNA, 19 nt, Artificial Sequence
  source: /note="Description of Artificial Sequence: Synthetic oligonucleotide"
  source: /note="Antisense strand to SEQ ID NO: 3357"
agugacaggacucgcuuua

SEQ ID NO: 3359 - RNA, 19 nt, Artificial Sequence
  source: /note="Description of Artificial Sequence: Synthetic oligonucleotide"
  source: /note="Sense strand starting at position 2033 of SEQ ID NO: 2504"
ugaccuccaucaggguaaa

SEQ ID NO: 3360 - RNA, 19 nt, Artificial Sequence
  source: /note="Description of Artificial Sequence: Synthetic oligonucleotide"
  source: /note="Antisense strand to SEQ ID NO: 3359"
uuuacccugauggagguca

SEQ ID NO: 3361 - RNA, 19 nt, Artificial Sequence
  source: /note="Description of Artificial Sequence: Synthetic oligonucleotide"
  source: /note="Sense strand starting at position 2033 of SEQ ID NO: 2601"
ucaucucacucugguuaua

SEQ ID NO: 3362 - RNA, 19 nt, Artificial Sequence
  source: /note="Description of Artificial Sequence: Synthetic oligonucleotide"
  source: /note="Antisense strand to SEQ ID NO: 3361"
uauaaccagagugagauga

SEQ ID NO: 3363 - RNA, 19 nt, Artificial Sequence
  source: /note="Description of Artificial Sequence: Synthetic oligonucleotide"
  source: /note="Sense strand starting at position 2033 of SEQ ID NO: 2768"
ccuguugaaugagguuuaa

SEQ ID NO: 3364 - RNA, 19 nt, Artificial Sequence
  source: /note="Description of Artificial Sequence: Synthetic oligonucleotide"
  source: /note="Antisense strand to SEQ ID NO: 3363"
uuaaaccucauucaacagg

SEQ ID NO: 3365 - RNA, 19 nt, Artificial Sequence
  source: /note="Description of Artificial Sequence: Synthetic oligonucleotide"
  source: /note="Sense strand starting at position 2033 of SEQ ID NO: 2794"
acaccacauuuauguugua

SEQ ID NO: 3366 - RNA, 19 nt, Artificial Sequence
  source: /note="Description of Artificial Sequence: Synthetic oligonucleotide"
  source: /note="Antisense strand to SEQ ID NO: 3365"
uacaacauaaauguggugu

SEQ ID NO: 3367 - RNA, 19 nt, Artificial Sequence
  source: /note="Description of Artificial Sequence: Synthetic oligonucleotide"
  source: /note="Sense strand starting at position 2033 of SEQ ID NO: 2799"
acauuuauguuguaagcuc

SEQ ID NO: 3368 - RNA, 19 nt, Artificial Sequence
  source: /note="Description of Artificial Sequence: Synthetic oligonucleotide"
  source: /note="Antisense strand to SEQ ID NO: 3367"
gagcuuacaacauaaaugu

SEQ ID NO: 3369 - RNA, 19 nt, Artificial Sequence
  source: /note="Description of Artificial Sequence: Synthetic oligonucleotide"
  source: /note="Sense strand starting at position 2033 of SEQ ID NO: 3022"
uaauguuuauuagggagag

SEQ ID NO: 3370 - RNA, 19 nt, Artificial Sequence
  source: /note="Description of Artificial Sequence: Synthetic oligonucleotide"
  source: /note="Antisense strand to SEQ ID NO: 3369"
cucucccuaauaaacauua

SEQ ID NO: 3371 - RNA, 19 nt, Artificial Sequence
  source: /note="Description of Artificial Sequence: Synthetic oligonucleotide"
  source: /note="Sense strand starting at position 2033 of SEQ ID NO: 3023"
aauguuuauuagggagagu

SEQ ID NO: 3372 - RNA, 19 nt, Artificial Sequence
  source: /note="Description of Artificial Sequence: Synthetic oligonucleotide"
  source: /note="Antisense strand to SEQ ID NO: 3371"
acucucccuaauaaacauu

SEQ ID NO: 3373 - RNA, 19 nt, Artificial Sequence
  source: /note="Description of Artificial Sequence: Synthetic oligonucleotide"
  source: /note="Sense strand starting at position 2033 of SEQ ID NO: 3060"
cucaaaguguaagagauua

SEQ ID NO: 3374 - RNA, 19 nt, Artificial Sequence
  source: /note="Description of Artificial Sequence: Synthetic oligonucleotide"
  source: /note="Antisense strand to SEQ ID NO: 3373"
uaaucucuuacacuuugag

SEQ ID NO: 3375 - RNA, 19 nt, Artificial Sequence
  source: /note="Description of Artificial Sequence: Synthetic oligonucleotide"
  source: /note="Sense strand starting at position 2033 of SEQ ID NO: 3121"
ugagcucaguucugcacaa

SEQ ID NO: 3376 - RNA, 19 nt, Artificial Sequence
  source: /note="Description of Artificial Sequence: Synthetic oligonucleotide"
  source: /note="Antisense strand to SEQ ID NO: 3375"
uugugcagaacugagcuca

SEQ ID NO: 3377 - RNA, 19 nt, Artificial Sequence
  source: /note="Description of Artificial Sequence: Synthetic oligonucleotide"
  source: /note="Sense strand starting at position 2033 of SEQ ID NO: 3140"
acaagaauguguuagggag

SEQ ID NO: 3378 - RNA, 19 nt, Artificial Sequence
  source: /note="Description of Artificial Sequence: Synthetic oligonucleotide"
  source: /note="Antisense strand to SEQ ID NO: 3377"
cucccuaacacauucuugu

SEQ ID NO: 3379 - RNA, 19 nt, Artificial Sequence
  source: /note="Description of Artificial Sequence: Synthetic oligonucleotide"
  source: /note="Sense strand starting at position 2033 of SEQ ID NO: 3172"
gucgacugguuuggaaaca

SEQ ID NO: 3380 - RNA, 19 nt, Artificial Sequence
  source: /note="Description of Artificial Sequence: Synthetic oligonucleotide"
  source: /note="Antisense strand to SEQ ID NO: 3379"
uguuuccaaaccagucgac

SEQ ID NO: 3381 - RNA, 19 nt, Artificial Sequence
  source: /note="Description of Artificial Sequence: Synthetic oligonucleotide"
  source: /note="Sense strand starting at position 2033 of SEQ ID NO: 3247"
gaugacagcugacacuaua

SEQ ID NO: 3382 - RNA, 19 nt, Artificial Sequence
  source: /note="Description of Artificial Sequence: Synthetic oligonucleotide"
  source: /note="Antisense strand to SEQ ID NO: 3381"
uauagugucagcugucauc

SEQ ID NO: 3383 - RNA, 19 nt, Artificial Sequence
  source: /note="Description of Artificial Sequence: Synthetic oligonucleotide"
  source: /note="Sense strand starting at position 2033 of SEQ ID NO: 3377"
gcuugugagugguagcauu

SEQ ID NO: 3384 - RNA, 19 nt, Artificial Sequence
  source: /note="Description of Artificial Sequence: Synthetic oligonucleotide"
  source: /note="Antisense strand to SEQ ID NO: 3383"
aaugcuaccacucacaagc

SEQ ID NO: 3385 - RNA, 19 nt, Artificial Sequence
  source: /note="Description of Artificial Sequence: Synthetic oligonucleotide"
  source: /note="Sense strand starting at position 2033 of SEQ ID NO: 3449"
uucuaugccucagaaauga

SEQ ID NO: 3386 - RNA, 19 nt, Artificial Sequence
  source: /note="Description of Artificial Sequence: Synthetic oligonucleotide"
  source: /note="Antisense strand to SEQ ID NO: 3385"
ucauuucugaggcauagaa

SEQ ID NO: 3387 - RNA, 19 nt, Artificial Sequence
  source: /note="Description of Artificial Sequence: Synthetic oligonucleotide"
  source: /note="Sense strand starting at position 2033 of SEQ ID NO: 3644"
gguuaaauggcuugccuac

SEQ ID NO: 3388 - RNA, 19 nt, Artificial Sequence
  source: /note="Description of Artificial Sequence: Synthetic oligonucleotide"
  source: /note="Antisense strand to SEQ ID NO: 3387"
guaggcaagccauuuaacc

SEQ ID NO: 3389 - RNA, 19 nt, Artificial Sequence
  source: /note="Description of Artificial Sequence: Synthetic oligonucleotide"
  source: /note="Sense strand starting at position 2033 of SEQ ID NO: 3686"
cuagacagauauuguccua

SEQ ID NO: 3390 - RNA, 19 nt, Artificial Sequence
  source: /note="Description of Artificial Sequence: Synthetic oligonucleotide"
  source: /note="Antisense strand to SEQ ID NO: 3389"
uaggacaauaucugucuag

SEQ ID NO: 3391 - RNA, 19 nt, Artificial Sequence
  source: /note="Description of Artificial Sequence: Synthetic oligonucleotide"
  source: /note="Sense strand starting at position 2033 of SEQ ID NO: 3691"
cagauauuguccuaggcac

SEQ ID NO: 3392 - RNA, 19 nt, Artificial Sequence
  source: /note="Description of Artificial Sequence: Synthetic oligonucleotide"
  source: /note="Antisense strand to SEQ ID NO: 3391"
gugccuaggacaauaucug

SEQ ID NO: 3393 - RNA, 19 nt, Artificial Sequence
  source: /note="Description of Artificial Sequence: Synthetic oligonucleotide"
  source: /note="Sense strand starting at position 2033 of SEQ ID NO: 3774"
augaguacauuauacagua

SEQ ID NO: 3394 - RNA, 19 nt, Artificial Sequence
  source: /note="Description of Artificial Sequence: Synthetic oligonucleotide"
  source: /note="Antisense strand to SEQ ID NO: 3393"
uacuguauaauguacucau

SEQ ID NO: 3395 - RNA, 19 nt, Artificial Sequence
  source: /note="Description of Artificial Sequence: Synthetic oligonucleotide"
  source: /note="Sense strand starting at position 2033 of SEQ ID NO: 3875"
ggagguuagucauggaaag

SEQ ID NO: 3396 - RNA, 19 nt, Artificial Sequence
  source: /note="Description of Artificial Sequence: Synthetic oligonucleotide"
  source: /note="Antisense strand to SEQ ID NO: 3395"
cuuuccaugacuaaccucc

SEQ ID NO: 3397 - RNA, 19 nt, Artificial Sequence
  source: /note="Description of Artificial Sequence: Synthetic oligonucleotide"
  source: /note="Sense strand starting at position 2035 of SEQ ID NO: 19"
ccacuacugucuugaugug

SEQ ID NO: 3398 - RNA, 19 nt, Artificial Sequence
  source: /note="Description of Artificial Sequence: Synthetic oligonucleotide"
  source: /note="Antisense strand to SEQ ID NO: 3397"
cacaucaagacaguagugg

SEQ ID NO: 3399 - RNA, 19 nt, Artificial Sequence
  source: /note="Description of Artificial Sequence: Synthetic oligonucleotide"
  source: /note="Sense strand starting at position 2035 of SEQ ID NO: 33"
auguguccuucccuccuaa

SEQ ID NO: 3400 - RNA, 19 nt, Artificial Sequence
  source: /note="Description of Artificial Sequence: Synthetic oligonucleotide"
  source: /note="Antisense strand to SEQ ID NO: 3399"
uuaggagggaaggacacau

SEQ ID NO: 3401 - RNA, 19 nt, Artificial Sequence
  source: /note="Description of Artificial Sequence: Synthetic oligonucleotide"
  source: /note="Sense strand starting at position 2035 of SEQ ID NO: 61"
agcauuaccugcugggaga

SEQ ID NO: 3402 - RNA, 19 nt, Artificial Sequence
  source: /note="Description of Artificial Sequence: Synthetic oligonucleotide"
  source: /note="Antisense strand to SEQ ID NO: 3401"
ucucccagcagguaaugcu

SEQ ID NO: 3403 - RNA, 19 nt, Artificial Sequence
  source: /note="Description of Artificial Sequence: Synthetic oligonucleotide"
  source: /note="Sense strand starting at position 2035 of SEQ ID NO: 62"
gcauuaccugcugggagau

SEQ ID NO: 3404 - RNA, 19 nt, Artificial Sequence
  source: /note="Description of Artificial Sequence: Synthetic oligonucleotide"
  source: /note="Antisense strand to SEQ ID NO: 3403"
aucucccagcagguaaugc

SEQ ID NO: 3405 - RNA, 19 nt, Artificial Sequence
  source: /note="Description of Artificial Sequence: Synthetic oligonucleotide"
  source: /note="Sense strand starting at position 2035 of SEQ ID NO: 78"
gauggcaaauccgaugaca

SEQ ID NO: 3406 - RNA, 19 nt, Artificial Sequence
  source: /note="Description of Artificial Sequence: Synthetic oligonucleotide"
  source: /note="Antisense strand to SEQ ID NO: 3405"
ugucaucggauuugccauc

SEQ ID NO: 3407 - RNA, 19 nt, Artificial Sequence
  source: /note="Description of Artificial Sequence: Synthetic oligonucleotide"
  source: /note="Sense strand starting at position 2035 of SEQ ID NO: 80"
uggcaaauccgaugacaac

SEQ ID NO: 3408 - RNA, 19 nt, Artificial Sequence
  source: /note="Description of Artificial Sequence: Synthetic oligonucleotide"
  source: /note="Antisense strand to SEQ ID NO: 3407"
guugucaucggauuugcca

SEQ ID NO: 3409 - RNA, 19 nt, Artificial Sequence
  source: /note="Description of Artificial Sequence: Synthetic oligonucleotide"
  source: /note="Sense strand starting at position 2035 of SEQ ID NO: 238"
cccacugucucauaaguaa

SEQ ID NO: 3410 - RNA, 19 nt, Artificial Sequence
  source: /note="Description of Artificial Sequence: Synthetic oligonucleotide"
  source: /note="Antisense strand to SEQ ID NO: 3409"
uuacuuaugagacaguggg

SEQ ID NO: 3411 - RNA, 19 nt, Artificial Sequence
  source: /note="Description of Artificial Sequence: Synthetic oligonucleotide"
  source: /note="Sense strand starting at position 2035 of SEQ ID NO: 338"
agcucuucaguggguugaa

SEQ ID NO: 3412 - RNA, 19 nt, Artificial Sequence
  source: /note="Description of Artificial Sequence: Synthetic oligonucleotide"
  source: /note="Antisense strand to SEQ ID NO: 3411"
uucaacccacugaagagcu

SEQ ID NO: 3413 - RNA, 19 nt, Artificial Sequence
  source: /note="Description of Artificial Sequence: Synthetic oligonucleotide"
  source: /note="Sense strand starting at position 2035 of SEQ ID NO: 341"
ucuucaguggguugaagaa

SEQ ID NO: 3414 - RNA, 19 nt, Artificial Sequence
  source: /note="Description of Artificial Sequence: Synthetic oligonucleotide"
  source: /note="Antisense strand to SEQ ID NO: 3413"
uucuucaacccacugaaga

SEQ ID NO: 3415 - RNA, 19 nt, Artificial Sequence
  source: /note="Description of Artificial Sequence: Synthetic oligonucleotide"
  source: /note="Sense strand starting at position 2035 of SEQ ID NO: 487"
ugguuagaguuguggagag

SEQ ID NO: 3416 - RNA, 19 nt, Artificial Sequence
  source: /note="Description of Artificial Sequence: Synthetic oligonucleotide"
  source: /note="Antisense strand to SEQ ID NO: 3415"
cucuccacaacucuaacca

SEQ ID NO: 3417 - RNA, 19 nt, Artificial Sequence
  source: /note="Description of Artificial Sequence: Synthetic oligonucleotide"
  source: /note="Sense strand starting at position 2035 of SEQ ID NO: 488"
gguuagaguuguggagaga

SEQ ID NO: 3418 - RNA, 19 nt, Artificial Sequence
  source: /note="Description of Artificial Sequence: Synthetic oligonucleotide"
  source: /note="Antisense strand to SEQ ID NO: 3417"
ucucuccacaacucuaacc

SEQ ID NO: 3419 - RNA, 19 nt, Artificial Sequence
  source: /note="Description of Artificial Sequence: Synthetic oligonucleotide"
  source: /note="Sense strand starting at position 2035 of SEQ ID NO: 600"
ugcccuguccaaugaguga

SEQ ID NO: 3420 - RNA, 19 nt, Artificial Sequence
  source: /note="Description of Artificial Sequence: Synthetic oligonucleotide"
  source: /note="Antisense strand to SEQ ID NO: 3419"
ucacucauuggacagggca

SEQ ID NO: 3421 - RNA, 19 nt, Artificial Sequence
  source: /note="Description of Artificial Sequence: Synthetic oligonucleotide"
  source: /note="Sense strand starting at position 2035 of SEQ ID NO: 697"
gaaguauccucagagcugu

SEQ ID NO: 3422 - RNA, 19 nt, Artificial Sequence
  source: /note="Description of Artificial Sequence: Synthetic oligonucleotide"
  source: /note="Antisense strand to SEQ ID NO: 3421"
acagcucugaggauacuuc

SEQ ID NO: 3423 - RNA, 19 nt, Artificial Sequence
  source: /note="Description of Artificial Sequence: Synthetic oligonucleotide"
  source: /note="Sense strand starting at position 2035 of SEQ ID NO: 727"
cagaauaaagccugcggaa

SEQ ID NO: 3424 - RNA, 19 nt, Artificial Sequence
  source: /note="Description of Artificial Sequence: Synthetic oligonucleotide"
  source: /note="Antisense strand to SEQ ID NO: 3423"
uuccgcaggcuuuauucug

SEQ ID NO: 3425 - RNA, 19 nt, Artificial Sequence
  source: /note="Description of Artificial Sequence: Synthetic oligonucleotide"
  source: /note="Sense strand starting at position 2035 of SEQ ID NO: 729"
gaauaaagccugcggaaga

SEQ ID NO: 3426 - RNA, 19 nt, Artificial Sequence
  source: /note="Description of Artificial Sequence: Synthetic oligonucleotide"
  source: /note="Antisense strand to SEQ ID NO: 3425"
ucuuccgcaggcuuuauuc

SEQ ID NO: 3427 - RNA, 19 nt, Artificial Sequence
  source: /note="Description of Artificial Sequence: Synthetic oligonucleotide"
  source: /note="Sense strand starting at position 2035 of SEQ ID NO: 739"
ugcggaagagucuguguga

SEQ ID NO: 3428 - RNA, 19 nt, Artificial Sequence
  source: /note="Description of Artificial Sequence: Synthetic oligonucleotide"
  source: /note="Antisense strand to SEQ ID NO: 3427"
ucacacagacucuuccgca

SEQ ID NO: 3429 - RNA, 19 nt, Artificial Sequence
  source: /note="Description of Artificial Sequence: Synthetic oligonucleotide"
  source: /note="Sense strand starting at position 2035 of SEQ ID NO: 752"
gugugagccucuuauccau

SEQ ID NO: 3430 - RNA, 19 nt, Artificial Sequence
  source: /note="Description of Artificial Sequence: Synthetic oligonucleotide"
  source: /note="Antisense strand to SEQ ID NO: 3429"
auggauaagaggcucacac

SEQ ID NO: 3431 - RNA, 19 nt, Artificial Sequence
  source: /note="Description of Artificial Sequence: Synthetic oligonucleotide"
  source: /note="Sense strand starting at position 2035 of SEQ ID NO: 922"
gggugagagugauagggau

SEQ ID NO: 3432 - RNA, 19 nt, Artificial Sequence
  source: /note="Description of Artificial Sequence: Synthetic oligonucleotide"
  source: /note="Antisense strand to SEQ ID NO: 3431"
aucccuaucacucucaccc

SEQ ID NO: 3433 - RNA, 19 nt, Artificial Sequence
  source: /note="Description of Artificial Sequence: Synthetic oligonucleotide"
  source: /note="Sense strand starting at position 2035 of SEQ ID NO: 988"
acauaaggcucaguaucuu

SEQ ID NO: 3434 - RNA, 19 nt, Artificial Sequence
  source: /note="Description of Artificial Sequence: Synthetic oligonucleotide"
  source: /note="Antisense strand to SEQ ID NO: 3433"
aagauacugagccuuaugu

SEQ ID NO: 3435 - RNA, 19 nt, Artificial Sequence
  source: /note="Description of Artificial Sequence: Synthetic oligonucleotide"
  source: /note="Sense strand starting at position 2035 of SEQ ID NO: 1719"
agcaguguuugggccgaga

SEQ ID NO: 3436 - RNA, 19 nt, Artificial Sequence
  source: /note="Description of Artificial Sequence: Synthetic oligonucleotide"
  source: /note="Antisense strand to SEQ ID NO: 3435"
ucucggcccaaacacugcu

SEQ ID NO: 3437 - RNA, 19 nt, Artificial Sequence
  source: /note="Description of Artificial Sequence: Synthetic oligonucleotide"
  source: /note="Sense strand starting at position 2035 of SEQ ID NO: 1721"
caguguuugggccgagaca

SEQ ID NO: 3438 - RNA, 19 nt, Artificial Sequence
  source: /note="Description of Artificial Sequence: Synthetic oligonucleotide"
  source: /note="Antisense strand to SEQ ID NO: 3437"
ugucucggcccaaacacug

SEQ ID NO: 3439 - RNA, 19 nt, Artificial Sequence
  source: /note="Description of Artificial Sequence: Synthetic oligonucleotide"
  source: /note="Sense strand starting at position 2035 of SEQ ID NO: 2374"
ugcccuuucccaggguaga

SEQ ID NO: 3440 - RNA, 19 nt, Artificial Sequence
  source: /note="Description of Artificial Sequence: Synthetic oligonucleotide"
  source: /note="Antisense strand to SEQ ID NO: 3439"
ucuacccugggaaagggca

SEQ ID NO: 3441 - RNA, 19 nt, Artificial Sequence
  source: /note="Description of Artificial Sequence: Synthetic oligonucleotide"
  source: /note="Sense strand starting at position 2035 of SEQ ID NO: 2610"
ugcucugucucacuggaga

SEQ ID NO: 3442 - RNA, 19 nt, Artificial Sequence
  source: /note="Description of Artificial Sequence: Synthetic oligonucleotide"
  source: /note="Antisense strand to SEQ ID NO: 3441"
ucuccagugagacagagca

SEQ ID NO: 3443 - RNA, 19 nt, Artificial Sequence
  source: /note="Description of Artificial Sequence: Synthetic oligonucleotide"
  source: /note="Sense strand starting at position 2035 of SEQ ID NO: 2612"
cucugucucacuggagagu

SEQ ID NO: 3444 - RNA, 19 nt, Artificial Sequence
  source: /note="Description of Artificial Sequence: Synthetic oligonucleotide"
  source: /note="Antisense strand to SEQ ID NO: 3443"
acucuccagugagacagag

SEQ ID NO: 3445 - RNA, 19 nt, Artificial Sequence
  source: /note="Description of Artificial Sequence: Synthetic oligonucleotide"
  source: /note="Sense strand starting at position 2035 of SEQ ID NO: 2721"
ugcugagcuuucuuugcau

SEQ ID NO: 3446 - RNA, 19 nt, Artificial Sequence
  source: /note="Description of Artificial Sequence: Synthetic oligonucleotide"
  source: /note="Antisense strand to SEQ ID NO: 3445"
augcaaagaaagcucagca

SEQ ID NO: 3447 - RNA, 19 nt, Artificial Sequence
  source: /note="Description of Artificial Sequence: Synthetic oligonucleotide"
  source: /note="Sense strand starting at position 2035 of SEQ ID NO: 2723"
cugagcuuucuuugcauua

SEQ ID NO: 3448 - RNA, 19 nt, Artificial Sequence
  source: /note="Description of Artificial Sequence: Synthetic oligonucleotide"
  source: /note="Antisense strand to SEQ ID NO: 3447"
uaaugcaaagaaagcucag

SEQ ID NO: 3449 - RNA, 19 nt, Artificial Sequence
  source: /note="Description of Artificial Sequence: Synthetic oligonucleotide"
  source: /note="Sense strand starting at position 2035 of SEQ ID NO: 2724"
ugagcuuucuuugcauuau

SEQ ID NO: 3450 - RNA, 19 nt, Artificial Sequence
  source: /note="Description of Artificial Sequence: Synthetic oligonucleotide"
  source: /note="Antisense strand to SEQ ID NO: 3449"
auaaugcaaagaaagcuca

SEQ ID NO: 3451 - RNA, 19 nt, Artificial Sequence
  source: /note="Description of Artificial Sequence: Synthetic oligonucleotide"
  source: /note="Sense strand starting at position 2035 of SEQ ID NO: 2725"
gagcuuucuuugcauuaug

SEQ ID NO: 3452 - RNA, 19 nt, Artificial Sequence
  source: /note="Description of Artificial Sequence: Synthetic oligonucleotide"
  source: /note="Antisense strand to SEQ ID NO: 3451"
cauaaugcaaagaaagcuc

SEQ ID NO: 3453 - RNA, 19 nt, Artificial Sequence
  source: /note="Description of Artificial Sequence: Synthetic oligonucleotide"
  source: /note="Sense strand starting at position 2035 of SEQ ID NO: 2733"
uuugcauuauguggcuuaa

SEQ ID NO: 3454 - RNA, 19 nt, Artificial Sequence
  source: /note="Description of Artificial Sequence: Synthetic oligonucleotide"
  source: /note="Antisense strand to SEQ ID NO: 3453"
uuaagccacauaaugcaaa

SEQ ID NO: 3455 - RNA, 19 nt, Artificial Sequence
  source: /note="Description of Artificial Sequence: Synthetic oligonucleotide"
  source: /note="Sense strand starting at position 2035 of SEQ ID NO: 2735"
ugcauuauguggcuuaauu

SEQ ID NO: 3456 - RNA, 19 nt, Artificial Sequence
  source: /note="Description of Artificial Sequence: Synthetic oligonucleotide"
  source: /note="Antisense strand to SEQ ID NO: 3455"
aauuaagccacauaaugca

SEQ ID NO: 3457 - RNA, 19 nt, Artificial Sequence
  source: /note="Description of Artificial Sequence: Synthetic oligonucleotide"
  source: /note="Sense strand starting at position 2035 of SEQ ID NO: 2744"
uggcuuaauucucagggca

SEQ ID NO: 3458 - RNA, 19 nt, Artificial Sequence
  source: /note="Description of Artificial Sequence: Synthetic oligonucleotide"
  source: /note="Antisense strand to SEQ ID NO: 3457"
ugcccugagaauuaagcca

SEQ ID NO: 3459 - RNA, 19 nt, Artificial Sequence
  source: /note="Description of Artificial Sequence: Synthetic oligonucleotide"
  source: /note="Sense strand starting at position 2035 of SEQ ID NO: 2746"
gcuuaauucucagggcaac

SEQ ID NO: 3460 - RNA, 19 nt, Artificial Sequence
  source: /note="Description of Artificial Sequence: Synthetic oligonucleotide"
  source: /note="Antisense strand to SEQ ID NO: 3459"
guugcccugagaauuaagc

SEQ ID NO: 3461 - RNA, 19 nt, Artificial Sequence
  source: /note="Description of Artificial Sequence: Synthetic oligonucleotide"
  source: /note="Sense strand starting at position 2035 of SEQ ID NO: 2772"
agucauacucugcacacuu

SEQ ID NO: 3462 - RNA, 19 nt, Artificial Sequence
  source: /note="Description of Artificial Sequence: Synthetic oligonucleotide"
  source: /note="Antisense strand to SEQ ID NO: 3461"
aagugugcagaguaugacu

SEQ ID NO: 3463 - RNA, 19 nt, Artificial Sequence
  source: /note="Description of Artificial Sequence: Synthetic oligonucleotide"
  source: /note="Sense strand starting at position 2035 of SEQ ID NO: 2880"
cucccaaagcugugcuuaa

SEQ ID NO: 3464 - RNA, 19 nt, Artificial Sequence
  source: /note="Description of Artificial Sequence: Synthetic oligonucleotide"
  source: /note="Antisense strand to SEQ ID NO: 3463"
uuaagcacagcuuugggag

SEQ ID NO: 3465 - RNA, 19 nt, Artificial Sequence
  source: /note="Description of Artificial Sequence: Synthetic oligonucleotide"
  source: /note="Sense strand starting at position 2035 of SEQ ID NO: 2884"
caaagcugugcuuaacuga

SEQ ID NO: 3466 - RNA, 19 nt, Artificial Sequence
  source: /note="Description of Artificial Sequence: Synthetic oligonucleotide"
  source: /note="Antisense strand to SEQ ID NO: 3465"
ucaguuaagcacagcuuug

SEQ ID NO: 3467 - RNA, 19 nt, Artificial Sequence
  source: /note="Description of Artificial Sequence: Synthetic oligonucleotide"
  source: /note="Sense strand starting at position 2035 of SEQ ID NO: 2934"
uccggagauucgugagacu

SEQ ID NO: 3468 - RNA, 19 nt, Artificial Sequence
  source: /note="Description of Artificial Sequence: Synthetic oligonucleotide"
  source: /note="Antisense strand to SEQ ID NO: 3467"
agucucacgaaucuccgga

SEQ ID NO: 3469 - RNA, 19 nt, Artificial Sequence
  source: /note="Description of Artificial Sequence: Synthetic oligonucleotide"
  source: /note="Sense strand starting at position 2035 of SEQ ID NO: 2937"
ggagauucgugagacucua

SEQ ID NO: 3470 - RNA, 19 nt, Artificial Sequence
  source: /note="Description of Artificial Sequence: Synthetic oligonucleotide"
  source: /note="Antisense strand to SEQ ID NO: 3469"
uagagucucacgaaucucc

SEQ ID NO: 3471 - RNA, 19 nt, Artificial Sequence
  source: /note="Description of Artificial Sequence: Synthetic oligonucleotide"
  source: /note="Sense strand starting at position 2035 of SEQ ID NO: 3141"
ccacgacuauccgaaauuc

SEQ ID NO: 3472 - RNA, 19 nt, Artificial Sequence
  source: /note="Description of Artificial Sequence: Synthetic oligonucleotide"
  source: /note="Antisense strand to SEQ ID NO: 3471"
gaauuucggauagucgugg

SEQ ID NO: 3473 - RNA, 19 nt, Artificial Sequence
  source: /note="Description of Artificial Sequence: Synthetic oligonucleotide"
  source: /note="Sense strand starting at position 2035 of SEQ ID NO: 3172"
ggcauuccuuugggucuua

SEQ ID NO: 3474 - RNA, 19 nt, Artificial Sequence
  source: /note="Description of Artificial Sequence: Synthetic oligonucleotide"
  source: /note="Antisense strand to SEQ ID NO: 3473"
uaagacccaaaggaaugcc

SEQ ID NO: 3475 - RNA, 19 nt, Artificial Sequence
  source: /note="Description of Artificial Sequence: Synthetic oligonucleotide"
  source: /note="Sense strand starting at position 2035 of SEQ ID NO: 3173"
gcauuccuuugggucuuaa

SEQ ID NO: 3476 - RNA, 19 nt, Artificial Sequence
  source: /note="Description of Artificial Sequence: Synthetic oligonucleotide"
  source: /note="Antisense strand to SEQ ID NO: 3475"
uuaagacccaaaggaaugc

SEQ ID NO: 3477 - RNA, 19 nt, Artificial Sequence
  source: /note="Description of Artificial Sequence: Synthetic oligonucleotide"
  source: /note="Sense strand starting at position 2035 of SEQ ID NO: 3177"
uccuuugggucuuaaaggu

SEQ ID NO: 3478 - RNA, 19 nt, Artificial Sequence
  source: /note="Description of Artificial Sequence: Synthetic oligonucleotide"
  source: /note="Antisense strand to SEQ ID NO: 3477"
accuuuaagacccaaagga

SEQ ID NO: 3479 - RNA, 19 nt, Artificial Sequence
  source: /note="Description of Artificial Sequence: Synthetic oligonucleotide"
  source: /note="Sense strand starting at position 2035 of SEQ ID NO: 3234"
ggagacgucuugcaaaguu

SEQ ID NO: 3480 - RNA, 19 nt, Artificial Sequence
  source: /note="Description of Artificial Sequence: Synthetic oligonucleotide"
  source: /note="Antisense strand to SEQ ID NO: 3479"
aacuuugcaagacgucucc

SEQ ID NO: 3481 - RNA, 19 nt, Artificial Sequence
  source: /note="Description of Artificial Sequence: Synthetic oligonucleotide"
  source: /note="Sense strand starting at position 2035 of SEQ ID NO: 3242"
cuugcaaaguucugccaca

SEQ ID NO: 3482 - RNA, 19 nt, Artificial Sequence
  source: /note="Description of Artificial Sequence: Synthetic oligonucleotide"
  source: /note="Antisense strand to SEQ ID NO: 3481"
uguggcagaacuuugcaag

SEQ ID NO: 3483 - RNA, 19 nt, Artificial Sequence
  source: /note="Description of Artificial Sequence: Synthetic oligonucleotide"
  source: /note="Sense strand starting at position 2035 of SEQ ID NO: 3258"
acagaaacgucuucagggu

SEQ ID NO: 3484 - RNA, 19 nt, Artificial Sequence
  source: /note="Description of Artificial Sequence: Synthetic oligonucleotide"
  source: /note="Antisense strand to SEQ ID NO: 3483"
acccugaagacguuucugu

SEQ ID NO: 3485 - RNA, 19 nt, Artificial Sequence
  source: /note="Description of Artificial Sequence: Synthetic oligonucleotide"
  source: /note="Sense strand starting at position 2035 of SEQ ID NO: 3328"
ggaagagcuuggugcagau

SEQ ID NO: 3486 - RNA, 19 nt, Artificial Sequence
  source: /note="Description of Artificial Sequence: Synthetic oligonucleotide"
  source: /note="Antisense strand to SEQ ID NO: 3485"
aucugcaccaagcucuucc

SEQ ID NO: 3487 - RNA, 19 nt, Artificial Sequence
  source: /note="Description of Artificial Sequence: Synthetic oligonucleotide"
  source: /note="Sense strand starting at position 2035 of SEQ ID NO: 3420"
cuguguuccuccuugguca

SEQ ID NO: 3488 - RNA, 19 nt, Artificial Sequence
  source: /note="Description of Artificial Sequence: Synthetic oligonucleotide"
  source: /note="Antisense strand to SEQ ID NO: 3487"
ugaccaaggaggaacacag

SEQ ID NO: 3489 - RNA, 19 nt, Artificial Sequence
  source: /note="Description of Artificial Sequence: Synthetic oligonucleotide"
  source: /note="Sense strand starting at position 2035 of SEQ ID NO: 3473"
gcucuuguugagcagcaga

SEQ ID NO: 3490 - RNA, 19 nt, Artificial Sequence
  source: /note="Description of Artificial Sequence: Synthetic oligonucleotide"
  source: /note="Antisense strand to SEQ ID NO: 3489"
ucugcugcucaacaagagc

SEQ ID NO: 3491 - RNA, 19 nt, Artificial Sequence
  source: /note="Description of Artificial Sequence: Synthetic oligonucleotide"
  source: /note="Sense strand starting at position 2035 of SEQ ID NO: 3476"
cuuguugagcagcagaauu

SEQ ID NO: 3492 - RNA, 19 nt, Artificial Sequence
  source: /note="Description of Artificial Sequence: Synthetic oligonucleotide"
  source: /note="Antisense strand to SEQ ID NO: 3491"
aauucugcugcucaacaag

SEQ ID NO: 3493 - RNA, 19 nt, Artificial Sequence
  source: /note="Description of Artificial Sequence: Synthetic oligonucleotide"
  source: /note="Sense strand starting at position 2035 of SEQ ID NO: 3576"
cauaccuuguccugggaga

SEQ ID NO: 3494 - RNA, 19 nt, Artificial Sequence
  source: /note="Description of Artificial Sequence: Synthetic oligonucleotide"
  source: /note="Antisense strand to SEQ ID NO: 3493"
ucucccaggacaagguaug

SEQ ID NO: 3495 - RNA, 19 nt, Artificial Sequence
  source: /note="Description of Artificial Sequence: Synthetic oligonucleotide"
  source: /note="Sense strand starting at position 2036 of SEQ ID NO: 40"
agcaguguuugggccgaga

SEQ ID NO: 3496 - RNA, 19 nt, Artificial Sequence
  source: /note="Description of Artificial Sequence: Synthetic oligonucleotide"
  source: /note="Antisense strand to SEQ ID NO: 3495"
ucucggcccaaacacugcu

SEQ ID NO: 3497 - RNA, 19 nt, Artificial Sequence
  source: /note="Description of Artificial Sequence: Synthetic oligonucleotide"
  source: /note="Sense strand starting at position 2036 of SEQ ID NO: 42"
caguguuugggccgagaca

SEQ ID NO: 3498 - RNA, 19 nt, Artificial Sequence
  source: /note="Description of Artificial Sequence: Synthetic oligonucleotide"
  source: /note="Antisense strand to SEQ ID NO: 3497"
ugucucggcccaaacacug

SEQ ID NO: 3499 - RNA, 19 nt, Artificial Sequence
  source: /note="Description of Artificial Sequence: Synthetic oligonucleotide"
  source: /note="Sense strand starting at position 2036 of SEQ ID NO: 695"
ugcccuuucccaggguaga

SEQ ID NO: 3500 - RNA, 19 nt, Artificial Sequence
  source: /note="Description of Artificial Sequence: Synthetic oligonucleotide"
  source: /note="Antisense strand to SEQ ID NO: 3499"
ucuacccugggaaagggca

SEQ ID NO: 3501 - RNA, 19 nt, Artificial Sequence
  source: /note="Description of Artificial Sequence: Synthetic oligonucleotide"
  source: /note="Sense strand starting at position 2036 of SEQ ID NO: 931"
ugcucugucucacuggaga

SEQ ID NO: 3502 - RNA, 19 nt, Artificial Sequence
  source: /note="Description of Artificial Sequence: Synthetic oligonucleotide"
  source: /note="Antisense strand to SEQ ID NO: 3501"
ucuccagugagacagagca

SEQ ID NO: 3503 - RNA, 19 nt, Artificial Sequence
  source: /note="Description of Artificial Sequence: Synthetic oligonucleotide"
  source: /note="Sense strand starting at position 2036 of SEQ ID NO: 933"
cucugucucacuggagagu

SEQ ID NO: 3504 - RNA, 19 nt, Artificial Sequence
  source: /note="Description of Artificial Sequence: Synthetic oligonucleotide"
  source: /note="Antisense strand to SEQ ID NO: 3503"
acucuccagugagacagag

SEQ ID NO: 3505 - RNA, 19 nt, Artificial Sequence
  source: /note="Description of Artificial Sequence: Synthetic oligonucleotide"
  source: /note="Sense strand starting at position 2036 of SEQ ID NO: 1042"
ugcugagcuuucuuugcau

SEQ ID NO: 3506 - RNA, 19 nt, Artificial Sequence
  source: /note="Description of Artificial Sequence: Synthetic oligonucleotide"
  source: /note="Antisense strand to SEQ ID NO: 3505"
augcaaagaaagcucagca

SEQ ID NO: 3507 - RNA, 19 nt, Artificial Sequence
  source: /note="Description of Artificial Sequence: Synthetic oligonucleotide"
  source: /note="Sense strand starting at position 2036 of SEQ ID NO: 1044"
cugagcuuucuuugcauua

SEQ ID NO: 3508 - RNA, 19 nt, Artificial Sequence
  source: /note="Description of Artificial Sequence: Synthetic oligonucleotide"
  source: /note="Antisense strand to SEQ ID NO: 3507"
uaaugcaaagaaagcucag

SEQ ID NO: 3509 - RNA, 19 nt, Artificial Sequence
  source: /note="Description of Artificial Sequence: Synthetic oligonucleotide"
  source: /note="Sense strand starting at position 2036 of SEQ ID NO: 1045"
ugagcuuucuuugcauuau

SEQ ID NO: 3510 - RNA, 19 nt, Artificial Sequence
  source: /note="Description of Artificial Sequence: Synthetic oligonucleotide"
  source: /note="Antisense strand to SEQ ID NO: 3509"
auaaugcaaagaaagcuca

SEQ ID NO: 3511 - RNA, 19 nt, Artificial Sequence
  source: /note="Description of Artificial Sequence: Synthetic oligonucleotide"
  source: /note="Sense strand starting at position 2036 of SEQ ID NO: 1046"
gagcuuucuuugcauuaug

SEQ ID NO: 3512 - RNA, 19 nt, Artificial Sequence
  source: /note="Description of Artificial Sequence: Synthetic oligonucleotide"
  source: /note="Antisense strand to SEQ ID NO: 3511"
cauaaugcaaagaaagcuc

SEQ ID NO: 3513 - RNA, 19 nt, Artificial Sequence
  source: /note="Description of Artificial Sequence: Synthetic oligonucleotide"
  source: /note="Sense strand starting at position 2036 of SEQ ID NO: 1054"
uuugcauuauguggcuuaa

SEQ ID NO: 3514 - RNA, 19 nt, Artificial Sequence
  source: /note="Description of Artificial Sequence: Synthetic oligonucleotide"
  source: /note="Antisense strand to SEQ ID NO: 3513"
uuaagccacauaaugcaaa

SEQ ID NO: 3515 - RNA, 19 nt, Artificial Sequence
  source: /note="Description of Artificial Sequence: Synthetic oligonucleotide"
  source: /note="Sense strand starting at position 2036 of SEQ ID NO: 1056"
ugcauuauguggcuuaauu

SEQ ID NO: 3516 - RNA, 19 nt, Artificial Sequence
  source: /note="Description of Artificial Sequence: Synthetic oligonucleotide"
  source: /note="Antisense strand to SEQ ID NO: 3515"
aauuaagccacauaaugca

SEQ ID NO: 3517 - RNA, 19 nt, Artificial Sequence
  source: /note="Description of Artificial Sequence: Synthetic oligonucleotide"
  source: /note="Sense strand starting at position 2036 of SEQ ID NO: 1065"
uggcuuaauucucagggca

SEQ ID NO: 3518 - RNA, 19 nt, Artificial Sequence
  source: /note="Description of Artificial Sequence: Synthetic oligonucleotide"
  source: /note="Antisense strand to SEQ ID NO: 3517"
ugcccugagaauuaagcca

SEQ ID NO: 3519 - RNA, 19 nt, Artificial Sequence
  source: /note="Description of Artificial Sequence: Synthetic oligonucleotide"
  source: /note="Sense strand starting at position 2036 of SEQ ID NO: 1067"
gcuuaauucucagggcaac

SEQ ID NO: 3520 - RNA, 19 nt, Artificial Sequence
  source: /note="Description of Artificial Sequence: Synthetic oligonucleotide"
  source: /note="Antisense strand to SEQ ID NO: 3519"
guugcccugagaauuaagc

SEQ ID NO: 3521 - RNA, 19 nt, Artificial Sequence
  source: /note="Description of Artificial Sequence: Synthetic oligonucleotide"
  source: /note="Sense strand starting at position 2036 of SEQ ID NO: 1093"
agucauacucugcacacuu

SEQ ID NO: 3522 - RNA, 19 nt, Artificial Sequence
  source: /note="Description of Artificial Sequence: Synthetic oligonucleotide"
  source: /note="Antisense strand to SEQ ID NO: 3521"
aagugugcagaguaugacu

SEQ ID NO: 3523 - RNA, 19 nt, Artificial Sequence
  source: /note="Description of Artificial Sequence: Synthetic oligonucleotide"
  source: /note="Sense strand starting at position 2036 of SEQ ID NO: 1201"
cucccaaagcugugcuuaa

SEQ ID NO: 3524 - RNA, 19 nt, Artificial Sequence
  source: /note="Description of Artificial Sequence: Synthetic oligonucleotide"
  source: /note="Antisense strand to SEQ ID NO: 3523"
uuaagcacagcuuugggag

SEQ ID NO: 3525 - RNA, 19 nt, Artificial Sequence
  source: /note="Description of Artificial Sequence: Synthetic oligonucleotide"
  source: /note="Sense strand starting at position 2036 of SEQ ID NO: 1205"
caaagcugugcuuaacuga

SEQ ID NO: 3526 - RNA, 19 nt, Artificial Sequence
  source: /note="Description of Artificial Sequence: Synthetic oligonucleotide"
  source: /note="Antisense strand to SEQ ID NO: 3525"
ucaguuaagcacagcuuug

SEQ ID NO: 3527 - RNA, 19 nt, Artificial Sequence
  source: /note="Description of Artificial Sequence: Synthetic oligonucleotide"
  source: /note="Sense strand starting at position 2036 of SEQ ID NO: 1255"
uccggagauucgugagacu

SEQ ID NO: 3528 - RNA, 19 nt, Artificial Sequence
  source: /note="Description of Artificial Sequence: Synthetic oligonucleotide"
  source: /note="Antisense strand to SEQ ID NO: 3527"
agucucacgaaucuccgga

SEQ ID NO: 3529 - RNA, 19 nt, Artificial Sequence
  source: /note="Description of Artificial Sequence: Synthetic oligonucleotide"
  source: /note="Sense strand starting at position 2036 of SEQ ID NO: 1258"
ggagauucgugagacucua

SEQ ID NO: 3530 - RNA, 19 nt, Artificial Sequence
  source: /note="Description of Artificial Sequence: Synthetic oligonucleotide"
  source: /note="Antisense strand to SEQ ID NO: 3529"
uagagucucacgaaucucc

SEQ ID NO: 3531 - RNA, 19 nt, Artificial Sequence
  source: /note="Description of Artificial Sequence: Synthetic oligonucleotide"
  source: /note="Sense strand starting at position 2036 of SEQ ID NO: 1462"
ccacgacuauccgaaauuc

SEQ ID NO: 3532 - RNA, 19 nt, Artificial Sequence
  source: /note="Description of Artificial Sequence: Synthetic oligonucleotide"
  source: /note="Antisense strand to SEQ ID NO: 3531"
gaauuucggauagucgugg

SEQ ID NO: 3533 - RNA, 19 nt, Artificial Sequence
  source: /note="Description of Artificial Sequence: Synthetic oligonucleotide"
  source: /note="Sense strand starting at position 2036 of SEQ ID NO: 1493"
ggcauuccuuugggucuua

SEQ ID NO: 3534 - RNA, 19 nt, Artificial Sequence
  source: /note="Description of Artificial Sequence: Synthetic oligonucleotide"
  source: /note="Antisense strand to SEQ ID NO: 3533"
uaagacccaaaggaaugcc

SEQ ID NO: 3535 - RNA, 19 nt, Artificial Sequence
  source: /note="Description of Artificial Sequence: Synthetic oligonucleotide"
  source: /note="Sense strand starting at position 2036 of SEQ ID NO: 1494"
gcauuccuuugggucuuaa

SEQ ID NO: 3536 - RNA, 19 nt, Artificial Sequence
  source: /note="Description of Artificial Sequence: Synthetic oligonucleotide"
  source: /note="Antisense strand to SEQ ID NO: 3535"
uuaagacccaaaggaaugc

SEQ ID NO: 3537 - RNA, 19 nt, Artificial Sequence
  source: /note="Description of Artificial Sequence: Synthetic oligonucleotide"
  source: /note="Sense strand starting at position 2036 of SEQ ID NO: 1498"
uccuuugggucuuaaaggu

SEQ ID NO: 3538 - RNA, 19 nt, Artificial Sequence
  source: /note="Description of Artificial Sequence: Synthetic oligonucleotide"
  source: /note="Antisense strand to SEQ ID NO: 3537"
accuuuaagacccaaagga

SEQ ID NO: 3539 - RNA, 19 nt, Artificial Sequence
  source: /note="Description of Artificial Sequence: Synthetic oligonucleotide"
  source: /note="Sense strand starting at position 2036 of SEQ ID NO: 1555"
ggagacgucuugcaaaguu

SEQ ID NO: 3540 - RNA, 19 nt, Artificial Sequence
  source: /note="Description of Artificial Sequence: Synthetic oligonucleotide"
  source: /note="Antisense strand to SEQ ID NO: 3539"
aacuuugcaagacgucucc

SEQ ID NO: 3541 - RNA, 19 nt, Artificial Sequence
  source: /note="Description of Artificial Sequence: Synthetic oligonucleotide"
  source: /note="Sense strand starting at position 2036 of SEQ ID NO: 1563"
cuugcaaaguucugccaca

SEQ ID NO: 3542 - RNA, 19 nt, Artificial Sequence
  source: /note="Description of Artificial Sequence: Synthetic oligonucleotide"
  source: /note="Antisense strand to SEQ ID NO: 3541"
uguggcagaacuuugcaag

SEQ ID NO: 3543 - RNA, 19 nt, Artificial Sequence
  source: /note="Description of Artificial Sequence: Synthetic oligonucleotide"
  source: /note="Sense strand starting at position 2036 of SEQ ID NO: 1579"
acagaaacgucuucagggu

SEQ ID NO: 3544 - RNA, 19 nt, Artificial Sequence
  source: /note="Description of Artificial Sequence: Synthetic oligonucleotide"
  source: /note="Antisense strand to SEQ ID NO: 3543"
acccugaagacguuucugu

SEQ ID NO: 3545 - RNA, 19 nt, Artificial Sequence
  source: /note="Description of Artificial Sequence: Synthetic oligonucleotide"
  source: /note="Sense strand starting at position 2036 of SEQ ID NO: 1649"
ggaagagcuuggugcagau

SEQ ID NO: 3546 - RNA, 19 nt, Artificial Sequence
  source: /note="Description of Artificial Sequence: Synthetic oligonucleotide"
  source: /note="Antisense strand to SEQ ID NO: 3545"
aucugcaccaagcucuucc

SEQ ID NO: 3547 - RNA, 19 nt, Artificial Sequence
  source: /note="Description of Artificial Sequence: Synthetic oligonucleotide"
  source: /note="Sense strand starting at position 2036 of SEQ ID NO: 1741"
cuguguuccuccuugguca

SEQ ID NO: 3548 - RNA, 19 nt, Artificial Sequence
  source: /note="Description of Artificial Sequence: Synthetic oligonucleotide"
  source: /note="Antisense strand to SEQ ID NO: 3547"
ugaccaaggaggaacacag

SEQ ID NO: 3549 - RNA, 19 nt, Artificial Sequence
  source: /note="Description of Artificial Sequence: Synthetic oligonucleotide"
  source: /note="Sense strand starting at position 2036 of SEQ ID NO: 1794"
gcucuuguugagcagcaga

SEQ ID NO: 3550 - RNA, 19 nt, Artificial Sequence
  source: /note="Description of Artificial Sequence: Synthetic oligonucleotide"
  source: /note="Antisense strand to SEQ ID NO: 3549"
ucugcugcucaacaagagc

SEQ ID NO: 3551 - RNA, 19 nt, Artificial Sequence
  source: /note="Description of Artificial Sequence: Synthetic oligonucleotide"
  source: /note="Sense strand starting at position 2036 of SEQ ID NO: 1797"
cuuguugagcagcagaauu

SEQ ID NO: 3552 - RNA, 19 nt, Artificial Sequence
  source: /note="Description of Artificial Sequence: Synthetic oligonucleotide"
  source: /note="Antisense strand to SEQ ID NO: 3551"
aauucugcugcucaacaag

SEQ ID NO: 3553 - RNA, 19 nt, Artificial Sequence
  source: /note="Description of Artificial Sequence: Synthetic oligonucleotide"
  source: /note="Sense strand starting at position 2036 of SEQ ID NO: 1897"
cauaccuuguccugggaga

SEQ ID NO: 3554 - RNA, 19 nt, Artificial Sequence
  source: /note="Description of Artificial Sequence: Synthetic oligonucleotide"
  source: /note="Antisense strand to SEQ ID NO: 3553"
ucucccaggacaagguaug

SEQ ID NO: 3555 - RNA, 19 nt, Artificial Sequence
  source: /note="Description of Artificial Sequence: Synthetic oligonucleotide"
  source: /note="Sense strand starting at position 2036 of SEQ ID NO: 2325"
gcuggccucuuuggguaaa

SEQ ID NO: 3556 - RNA, 19 nt, Artificial Sequence
  source: /note="Description of Artificial Sequence: Synthetic oligonucleotide"
  source: /note="Antisense strand to SEQ ID NO: 3555"
uuuacccaaagaggccagc

SEQ ID NO: 3557 - RNA, 19 nt, Artificial Sequence
  source: /note="Description of Artificial Sequence: Synthetic oligonucleotide"
  source: /note="Sense strand starting at position 2036 of SEQ ID NO: 2434"
uuuggagaguugugacugu

SEQ ID NO: 3558 - RNA, 19 nt, Artificial Sequence
  source: /note="Description of Artificial Sequence: Synthetic oligonucleotide"
  source: /note="Antisense strand to SEQ ID NO: 3557"
acagucacaacucuccaaa

SEQ ID NO: 3559 - RNA, 19 nt, Artificial Sequence
  source: /note="Description of Artificial Sequence: Synthetic oligonucleotide"
  source: /note="Sense strand starting at position 2036 of SEQ ID NO: 2463"
ccuucucaguccucaugau

SEQ ID NO: 3560 - RNA, 19 nt, Artificial Sequence
  source: /note="Description of Artificial Sequence: Synthetic oligonucleotide"
  source: /note="Antisense strand to SEQ ID NO: 3559"
aucaugaggacugagaagg

SEQ ID NO: 3561 - RNA, 19 nt, Artificial Sequence
  source: /note="Description of Artificial Sequence: Synthetic oligonucleotide"
  source: /note="Sense strand starting at position 2036 of SEQ ID NO: 2467"
cucaguccucaugaugcau

SEQ ID NO: 3562 - RNA, 19 nt, Artificial Sequence
  source: /note="Description of Artificial Sequence: Synthetic oligonucleotide"
  source: /note="Antisense strand to SEQ ID NO: 3561"
augcaucaugaggacugag

SEQ ID NO: 3563 - RNA, 19 nt, Artificial Sequence
  source: /note="Description of Artificial Sequence: Synthetic oligonucleotide"
  source: /note="Sense strand starting at position 2036 of SEQ ID NO: 2489"
gugcuugggccuuaauucu

SEQ ID NO: 3564 - RNA, 19 nt, Artificial Sequence
  source: /note="Description of Artificial Sequence: Synthetic oligonucleotide"
  source: /note="Antisense strand to SEQ ID NO: 3563"
agaauuaaggcccaagcac

SEQ ID NO: 3565 - RNA, 19 nt, Artificial Sequence
  source: /note="Description of Artificial Sequence: Synthetic oligonucleotide"
  source: /note="Sense strand starting at position 2036 of SEQ ID NO: 2953"
gggcucauuaaaugauugu

SEQ ID NO: 3566 - RNA, 19 nt, Artificial Sequence
  source: /note="Description of Artificial Sequence: Synthetic oligonucleotide"
  source: /note="Antisense strand to SEQ ID NO: 3565"
acaaucauuuaaugagccc

SEQ ID NO: 3567 - RNA, 19 nt, Artificial Sequence
  source: /note="Description of Artificial Sequence: Synthetic oligonucleotide"
  source: /note="Sense strand starting at position 2036 of SEQ ID NO: 2960"
uuaaaugauuguugacugu

SEQ ID NO: 3568 - RNA, 19 nt, Artificial Sequence
  source: /note="Description of Artificial Sequence: Synthetic oligonucleotide"
  source: /note="Antisense strand to SEQ ID NO: 3567"
acagucaacaaucauuuaa

SEQ ID NO: 3569 - RNA, 19 nt, Artificial Sequence
  source: /note="Description of Artificial Sequence: Synthetic oligonucleotide"
  source: /note="Sense strand starting at position 2036 of SEQ ID NO: 2998"
uccaucauauguuuauuga

SEQ ID NO: 3570 - RNA, 19 nt, Artificial Sequence
  source: /note="Description of Artificial Sequence: Synthetic oligonucleotide"
  source: /note="Antisense strand to SEQ ID NO: 3569"
ucaauaaacauaugaugga

SEQ ID NO: 3571 - RNA, 19 nt, Artificial Sequence
  source: /note="Description of Artificial Sequence: Synthetic oligonucleotide"
  source: /note="Sense strand starting at position 2036 of SEQ ID NO: 3001"
aucauauguuuauugagca

SEQ ID NO: 3572 - RNA, 19 nt, Artificial Sequence
  source: /note="Description of Artificial Sequence: Synthetic oligonucleotide"
  source: /note="Antisense strand to SEQ ID NO: 3571"
ugcucaauaaacauaugau

SEQ ID NO: 3573 - RNA, 19 nt, Artificial Sequence
  source: /note="Description of Artificial Sequence: Synthetic oligonucleotide"
  source: /note="Sense strand starting at position 2036 of SEQ ID NO: 3031"
ccaggcccuguguaauauu

SEQ ID NO: 3574 - RNA, 19 nt, Artificial Sequence
  source: /note="Description of Artificial Sequence: Synthetic oligonucleotide"
  source: /note="Antisense strand to SEQ ID NO: 3573"
aauauuacacagggccugg

SEQ ID NO: 3575 - RNA, 19 nt, Artificial Sequence
  source: /note="Description of Artificial Sequence: Synthetic oligonucleotide"
  source: /note="Sense strand starting at position 2036 of SEQ ID NO: 3039"
uguguaauauucuggaaac

SEQ ID NO: 3576 - RNA, 19 nt, Artificial Sequence
  source: /note="Description of Artificial Sequence: Synthetic oligonucleotide"
  source: /note="Antisense strand to SEQ ID NO: 3575"
guuuccagaauauuacaca

SEQ ID NO: 3577 - RNA, 19 nt, Artificial Sequence
  source: /note="Description of Artificial Sequence: Synthetic oligonucleotide"
  source: /note="Sense strand starting at position 2036 of SEQ ID NO: 3040"
guguaauauucuggaaaca

SEQ ID NO: 3578 - RNA, 19 nt, Artificial Sequence
  source: /note="Description of Artificial Sequence: Synthetic oligonucleotide"
  source: /note="Antisense strand to SEQ ID NO: 3577"
uguuuccagaauauuacac

SEQ ID NO: 3579 - RNA, 19 nt, Artificial Sequence
  source: /note="Description of Artificial Sequence: Synthetic oligonucleotide"
  source: /note="Sense strand starting at position 2036 of SEQ ID NO: 3141"
gggcuucauuuggaggacu

SEQ ID NO: 3580 - RNA, 19 nt, Artificial Sequence
  source: /note="Description of Artificial Sequence: Synthetic oligonucleotide"
  source: /note="Antisense strand to SEQ ID NO: 3579"
aguccuccaaaugaagccc

SEQ ID NO: 3581 - RNA, 19 nt, Artificial Sequence
  source: /note="Description of Artificial Sequence: Synthetic oligonucleotide"
  source: /note="Sense strand starting at position 2036 of SEQ ID NO: 3755"
cccggacuuuauccauguu

SEQ ID NO: 3582 - RNA, 19 nt, Artificial Sequence
  source: /note="Description of Artificial Sequence: Synthetic oligonucleotide"
  source: /note="Antisense strand to SEQ ID NO: 3581"
aacauggauaaaguccggg

SEQ ID NO: 3583 - RNA, 19 nt, Artificial Sequence
  source: /note="Description of Artificial Sequence: Synthetic oligonucleotide"
  source: /note="Sense strand starting at position 2036 of SEQ ID NO: 3758"
ggacuuuauccauguuauu

SEQ ID NO: 3584 - RNA, 19 nt, Artificial Sequence
  source: /note="Description of Artificial Sequence: Synthetic oligonucleotide"
  source: /note="Antisense strand to SEQ ID NO: 3583"
aauaacauggauaaagucc

SEQ ID NO: 3585 - RNA, 19 nt, Artificial Sequence
  source: /note="Description of Artificial Sequence: Synthetic oligonucleotide"
  source: /note="Sense strand starting at position 2036 of SEQ ID NO: 3779"
gagucuuaggcugguaugu

SEQ ID NO: 3586 - RNA, 19 nt, Artificial Sequence
  source: /note="Description of Artificial Sequence: Synthetic oligonucleotide"
  source: /note="Antisense strand to SEQ ID NO: 3585"
acauaccagccuaagacuc

SEQ ID NO: 3587 - RNA, 19 nt, Artificial Sequence
  source: /note="Description of Artificial Sequence: Synthetic oligonucleotide"
  source: /note="Sense strand starting at position 2036 of SEQ ID NO: 3785"
uaggcugguaugugucauu

SEQ ID NO: 3588 - RNA, 19 nt, Artificial Sequence
  source: /note="Description of Artificial Sequence: Synthetic oligonucleotide"
  source: /note="Antisense strand to SEQ ID NO: 3587"
aaugacacauaccagccua

SEQ ID NO: 3589 - RNA, 19 nt, Artificial Sequence
  source: /note="Description of Artificial Sequence: Synthetic oligonucleotide"
  source: /note="Sense strand starting at position 2036 of SEQ ID NO: 3788"
gcugguaugugucauuaac

SEQ ID NO: 3590 - RNA, 19 nt, Artificial Sequence
  source: /note="Description of Artificial Sequence: Synthetic oligonucleotide"
  source: /note="Antisense strand to SEQ ID NO: 3589"
guuaaugacacauaccagc

SEQ ID NO: 3591 - RNA, 19 nt, Artificial Sequence
  source: /note="Description of Artificial Sequence: Synthetic oligonucleotide"
  source: /note="Sense strand starting at position 2036 of SEQ ID NO: 3790"
ugguaugugucauuaacuu

SEQ ID NO: 3592 - RNA, 19 nt, Artificial Sequence
  source: /note="Description of Artificial Sequence: Synthetic oligonucleotide"
  source: /note="Antisense strand to SEQ ID NO: 3591"
aaguuaaugacacauacca

SEQ ID NO: 3593 - RNA, 19 nt, Artificial Sequence
  source: /note="Description of Artificial Sequence: Synthetic oligonucleotide"
  source: /note="Sense strand starting at position 2036 of SEQ ID NO: 3848"
ggacuugcccugugucaca

SEQ ID NO: 3594 - RNA, 19 nt, Artificial Sequence
  source: /note="Description of Artificial Sequence: Synthetic oligonucleotide"
  source: /note="Antisense strand to SEQ ID NO: 3593"
ugugacacagggcaagucc

SEQ ID NO: 3595 - RNA, 19 nt, Artificial Sequence
  source: /note="Description of Artificial Sequence: Synthetic oligonucleotide"
  source: /note="Sense strand starting at position 2036 of SEQ ID NO: 3882"
agagacaugucucaaauua

SEQ ID NO: 3596 - RNA, 19 nt, Artificial Sequence
  source: /note="Description of Artificial Sequence: Synthetic oligonucleotide"
  source: /note="Antisense strand to SEQ ID NO: 3595"
uaauuugagacaugucucu

SEQ ID NO: 3597 - RNA, 19 nt, Artificial Sequence
  source: /note="Description of Artificial Sequence: Synthetic oligonucleotide"
  source: /note="Sense strand starting at position 2036 of SEQ ID NO: 3900"
aaauuaugcggcugcaagu

SEQ ID NO: 3598 - RNA, 19 nt, Artificial Sequence
  source: /note="Description of Artificial Sequence: Synthetic oligonucleotide"
  source: /note="Antisense strand to SEQ ID NO: 3597"
acuugcagccgcauaauuu

SEQ ID NO: 3599 - RNA, 19 nt, Artificial Sequence
  source: /note="Description of Artificial Sequence: Synthetic oligonucleotide"
  source: /note="Sense strand starting at position 2037 of SEQ ID NO: 16"
gguagcagccguucucgaa

SEQ ID NO: 3600 - RNA, 19 nt, Artificial Sequence
  source: /note="Description of Artificial Sequence: Synthetic oligonucleotide"
  source: /note="Antisense strand to SEQ ID NO: 3599"
uucgagaacggcugcuacc

SEQ ID NO: 3601 - RNA, 19 nt, Artificial Sequence
  source: /note="Description of Artificial Sequence: Synthetic oligonucleotide"
  source: /note="Sense strand starting at position 2037 of SEQ ID NO: 32"
gaacauguugcccgaguca

SEQ ID NO: 3602 - RNA, 19 nt, Artificial Sequence
  source: /note="Description of Artificial Sequence: Synthetic oligonucleotide"
  source: /note="Antisense strand to SEQ ID NO: 3601"
ugacucgggcaacauguuc

SEQ ID NO: 3603 - RNA, 19 nt, Artificial Sequence
  source: /note="Description of Artificial Sequence: Synthetic oligonucleotide"
  source: /note="Sense strand starting at position 2037 of SEQ ID NO: 106"
ucaggaaacagucguugaa

SEQ ID NO: 3604 - RNA, 19 nt, Artificial Sequence
  source: /note="Description of Artificial Sequence: Synthetic oligonucleotide"
  source: /note="Antisense strand to SEQ ID NO: 3603"
uucaacgacuguuuccuga

SEQ ID NO: 3605 - RNA, 19 nt, Artificial Sequence
  source: /note="Description of Artificial Sequence: Synthetic oligonucleotide"
  source: /note="Sense strand starting at position 2037 of SEQ ID NO: 109"
ggaaacagucguugaagga

SEQ ID NO: 3606 - RNA, 19 nt, Artificial Sequence
  source: /note="Description of Artificial Sequence: Synthetic oligonucleotide"
  source: /note="Antisense strand to SEQ ID NO: 3605"
uccuucaacgacuguuucc

SEQ ID NO: 3607 - RNA, 19 nt, Artificial Sequence
  source: /note="Description of Artificial Sequence: Synthetic oligonucleotide"
  source: /note="Sense strand starting at position 2037 of SEQ ID NO: 160"
gcugguucugccgguagaa

SEQ ID NO: 3608 - RNA, 19 nt, Artificial Sequence
  source: /note="Description of Artificial Sequence: Synthetic oligonucleotide"
  source: /note="Antisense strand to SEQ ID NO: 3607"
uucuaccggcagaaccagc

SEQ ID NO: 3609 - RNA, 19 nt, Artificial Sequence
  source: /note="Description of Artificial Sequence: Synthetic oligonucleotide"
  source: /note="Sense strand starting at position 2037 of SEQ ID NO: 364"
uggaguucauguuggcgua

SEQ ID NO: 3610 - RNA, 19 nt, Artificial Sequence
  source: /note="Description of Artificial Sequence: Synthetic oligonucleotide"
  source: /note="Antisense strand to SEQ ID NO: 3609"
uacgccaacaugaacucca

SEQ ID NO: 3611 - RNA, 19 nt, Artificial Sequence
  source: /note="Description of Artificial Sequence: Synthetic oligonucleotide"
  source: /note="Sense strand starting at position 2037 of SEQ ID NO: 619"
ccgacaugcucauguacgu

SEQ ID NO: 3612 - RNA, 19 nt, Artificial Sequence
  source: /note="Description of Artificial Sequence: Synthetic oligonucleotide"
  source: /note="Antisense strand to SEQ ID NO: 3611"
acguacaugagcaugucgg

SEQ ID NO: 3613 - RNA, 19 nt, Artificial Sequence
  source: /note="Description of Artificial Sequence: Synthetic oligonucleotide"
  source: /note="Sense strand starting at position 2037 of SEQ ID NO: 664"
cguucauguugcucacgga

SEQ ID NO: 3614 - RNA, 19 nt, Artificial Sequence
  source: /note="Description of Artificial Sequence: Synthetic oligonucleotide"
  source: /note="Antisense strand to SEQ ID NO: 3613"
uccgugagcaacaugaacg

SEQ ID NO: 3615 - RNA, 19 nt, Artificial Sequence
  source: /note="Description of Artificial Sequence: Synthetic oligonucleotide"
  source: /note="Sense strand starting at position 2037 of SEQ ID NO: 667"
ucauguugcucacggagga

SEQ ID NO: 3616 - RNA, 19 nt, Artificial Sequence
  source: /note="Description of Artificial Sequence: Synthetic oligonucleotide"
  source: /note="Antisense strand to SEQ ID NO: 3615"
uccuccgugagcaacauga

SEQ ID NO: 3617 - RNA, 19 nt, Artificial Sequence
  source: /note="Description of Artificial Sequence: Synthetic oligonucleotide"
  source: /note="Sense strand starting at position 2037 of SEQ ID NO: 852"
cagggagagucaugaucga

SEQ ID NO: 3618 - RNA, 19 nt, Artificial Sequence
  source: /note="Description of Artificial Sequence: Synthetic oligonucleotide"
  source: /note="Antisense strand to SEQ ID NO: 3617"
ucgaucaugacucucccug

SEQ ID NO: 3619 - RNA, 19 nt, Artificial Sequence
  source: /note="Description of Artificial Sequence: Synthetic oligonucleotide"
  source: /note="Sense strand starting at position 2037 of SEQ ID NO: 1187"
ucccuugucccagggaaac

SEQ ID NO: 3620 - RNA, 19 nt, Artificial Sequence
  source: /note="Description of Artificial Sequence: Synthetic oligonucleotide"
  source: /note="Antisense strand to SEQ ID NO: 3619"
guuucccugggacaaggga

SEQ ID NO: 3621 - RNA, 19 nt, Artificial Sequence
  source: /note="Description of Artificial Sequence: Synthetic oligonucleotide"
  source: /note="Sense strand starting at position 2037 of SEQ ID NO: 1323"
cucuuuguccacuagucuu

SEQ ID NO: 3622 - RNA, 19 nt, Artificial Sequence
  source: /note="Description of Artificial Sequence: Synthetic oligonucleotide"
  source: /note="Antisense strand to SEQ ID NO: 3621"
aagacuaguggacaaagag

SEQ ID NO: 3623 - RNA, 19 nt, Artificial Sequence
  source: /note="Description of Artificial Sequence: Synthetic oligonucleotide"
  source: /note="Sense strand starting at position 2037 of SEQ ID NO: 1449"
acauaacucuguuaggaua

SEQ ID NO: 3624 - RNA, 19 nt, Artificial Sequence
  source: /note="Description of Artificial Sequence: Synthetic oligonucleotide"
  source: /note="Antisense strand to SEQ ID NO: 3623"
uauccuaacagaguuaugu

SEQ ID NO: 3625 - RNA, 19 nt, Artificial Sequence
  source: /note="Description of Artificial Sequence: Synthetic oligonucleotide"
  source: /note="Sense strand starting at position 2037 of SEQ ID NO: 1451"
auaacucuguuaggauagu

SEQ ID NO: 3626 - RNA, 19 nt, Artificial Sequence
  source: /note="Description of Artificial Sequence: Synthetic oligonucleotide"
  source: /note="Antisense strand to SEQ ID NO: 3625"
acuauccuaacagaguuau

SEQ ID NO: 3627 - RNA, 19 nt, Artificial Sequence
  source: /note="Description of Artificial Sequence: Synthetic oligonucleotide"
  source: /note="Sense strand starting at position 2037 of SEQ ID NO: 1543"
aggcuaacagugugucgua

SEQ ID NO: 3628 - RNA, 19 nt, Artificial Sequence
  source: /note="Description of Artificial Sequence: Synthetic oligonucleotide"
  source: /note="Antisense strand to SEQ ID NO: 3627"
uacgacacacuguuagccu

SEQ ID NO: 3629 - RNA, 19 nt, Artificial Sequence
  source: /note="Description of Artificial Sequence: Synthetic oligonucleotide"
  source: /note="Sense strand starting at position 2037 of SEQ ID NO: 1544"
ggcuaacagugugucguau

SEQ ID NO: 3630 - RNA, 19 nt, Artificial Sequence
  source: /note="Description of Artificial Sequence: Synthetic oligonucleotide"
  source: /note="Antisense strand to SEQ ID NO: 3629"
auacgacacacuguuagcc

SEQ ID NO: 3631 - RNA, 19 nt, Artificial Sequence
  source: /note="Description of Artificial Sequence: Synthetic oligonucleotide"
  source: /note="Sense strand starting at position 2037 of SEQ ID NO: 1545"
gcuaacagugugucguaua

SEQ ID NO: 3632 - RNA, 19 nt, Artificial Sequence
  source: /note="Description of Artificial Sequence: Synthetic oligonucleotide"
  source: /note="Antisense strand to SEQ ID NO: 3631"
uauacgacacacuguuagc

SEQ ID NO: 3633 - RNA, 19 nt, Artificial Sequence
  source: /note="Description of Artificial Sequence: Synthetic oligonucleotide"
  source: /note="Sense strand starting at position 2037 of SEQ ID NO: 1546"
cuaacagugugucguauaa

SEQ ID NO: 3634 - RNA, 19 nt, Artificial Sequence
  source: /note="Description of Artificial Sequence: Synthetic oligonucleotide"
  source: /note="Antisense strand to SEQ ID NO: 3633"
uuauacgacacacuguuag

SEQ ID NO: 3635 - RNA, 19 nt, Artificial Sequence
  source: /note="Description of Artificial Sequence: Synthetic oligonucleotide"
  source: /note="Sense strand starting at position 2037 of SEQ ID NO: 2288"
gugggaggcuggugauaua

SEQ ID NO: 3636 - RNA, 19 nt, Artificial Sequence
  source: /note="Description of Artificial Sequence: Synthetic oligonucleotide"
  source: /note="Antisense strand to SEQ ID NO: 3635"
uauaucaccagccucccac

SEQ ID NO: 3637 - RNA, 19 nt, Artificial Sequence
  source: /note="Description of Artificial Sequence: Synthetic oligonucleotide"
  source: /note="Sense strand starting at position 2037 of SEQ ID NO: 2347"
ggcagcccauuugaauaau

SEQ ID NO: 3638 - RNA, 19 nt, Artificial Sequence
  source: /note="Description of Artificial Sequence: Synthetic oligonucleotide"
  source: /note="Antisense strand to SEQ ID NO: 3637"
auuauucaaaugggcugcc

SEQ ID NO: 3639 - RNA, 19 nt, Artificial Sequence
  source: /note="Description of Artificial Sequence: Synthetic oligonucleotide"
  source: /note="Sense strand starting at position 2037 of SEQ ID NO: 2675"
cccggcagaucccuaugaa

SEQ ID NO: 3640 - RNA, 19 nt, Artificial Sequence
  source: /note="Description of Artificial Sequence: Synthetic oligonucleotide"
  source: /note="Antisense strand to SEQ ID NO: 3639"
uucauagggaucugccggg

SEQ ID NO: 3641 - RNA, 19 nt, Artificial Sequence
  source: /note="Description of Artificial Sequence: Synthetic oligonucleotide"
  source: /note="Sense strand starting at position 2037 of SEQ ID NO: 2676"
ccggcagaucccuaugaaa

SEQ ID NO: 3642 - RNA, 19 nt, Artificial Sequence
  source: /note="Description of Artificial Sequence: Synthetic oligonucleotide"
  source: /note="Antisense strand to SEQ ID NO: 3641"
uuucauagggaucugccgg

SEQ ID NO: 3643 - RNA, 19 nt, Artificial Sequence
  source: /note="Description of Artificial Sequence: Synthetic oligonucleotide"
  source: /note="Sense strand starting at position 2037 of SEQ ID NO: 2678"
ggcagaucccuaugaaagc

SEQ ID NO: 3644 - RNA, 19 nt, Artificial Sequence
  source: /note="Description of Artificial Sequence: Synthetic oligonucleotide"
  source: /note="Antisense strand to SEQ ID NO: 3643"
gcuuucauagggaucugcc

SEQ ID NO: 3645 - RNA, 19 nt, Artificial Sequence
  source: /note="Description of Artificial Sequence: Synthetic oligonucleotide"
  source: /note="Sense strand starting at position 2037 of SEQ ID NO: 2702"
uuauuuaugccggguuucu

SEQ ID NO: 3646 - RNA, 19 nt, Artificial Sequence
  source: /note="Description of Artificial Sequence: Synthetic oligonucleotide"
  source: /note="Antisense strand to SEQ ID NO: 3645"
agaaacccggcauaaauaa

SEQ ID NO: 3647 - RNA, 19 nt, Artificial Sequence
  source: /note="Description of Artificial Sequence: Synthetic oligonucleotide"
  source: /note="Sense strand starting at position 2037 of SEQ ID NO: 2711"
ccggguuucuucgcucuca

SEQ ID NO: 3648 - RNA, 19 nt, Artificial Sequence
  source: /note="Description of Artificial Sequence: Synthetic oligonucleotide"
  source: /note="Antisense strand to SEQ ID NO: 3647"
ugagagcgaagaaacccgg

SEQ ID NO: 3649 - RNA, 19 nt, Artificial Sequence
  source: /note="Description of Artificial Sequence: Synthetic oligonucleotide"
  source: /note="Sense strand starting at position 2037 of SEQ ID NO: 2713"
ggguuucuucgcucucagu

SEQ ID NO: 3650 - RNA, 19 nt, Artificial Sequence
  source: /note="Description of Artificial Sequence: Synthetic oligonucleotide"
  source: /note="Antisense strand to SEQ ID NO: 3649"
acugagagcgaagaaaccc

SEQ ID NO: 3651 - RNA, 19 nt, Artificial Sequence
  source: /note="Description of Artificial Sequence: Synthetic oligonucleotide"
  source: /note="Sense strand starting at position 2037 of SEQ ID NO: 2729"
agugcucauucucugucaa

SEQ ID NO: 3652 - RNA, 19 nt, Artificial Sequence
  source: /note="Description of Artificial Sequence: Synthetic oligonucleotide"
  source: /note="Antisense strand to SEQ ID NO: 3651"
uugacagagaaugagcacu

SEQ ID NO: 3653 - RNA, 19 nt, Artificial Sequence
  source: /note="Description of Artificial Sequence: Synthetic oligonucleotide"
  source: /note="Sense strand starting at position 2037 of SEQ ID NO: 2730"
gugcucauucucugucaaa

SEQ ID NO: 3654 - RNA, 19 nt, Artificial Sequence
  source: /note="Description of Artificial Sequence: Synthetic oligonucleotide"
  source: /note="Antisense strand to SEQ ID NO: 3653"
uuugacagagaaugagcac

SEQ ID NO: 3655 - RNA, 19 nt, Artificial Sequence
  source: /note="Description of Artificial Sequence: Synthetic oligonucleotide"
  source: /note="Sense strand starting at position 2037 of SEQ ID NO: 2773"
ugcaaagcgcuguccuauu

SEQ ID NO: 3656 - RNA, 19 nt, Artificial Sequence
  source: /note="Description of Artificial Sequence: Synthetic oligonucleotide"
  source: /note="Antisense strand to SEQ ID NO: 3655"
aauaggacagcgcuuugca

SEQ ID NO: 3657 - RNA, 19 nt, Artificial Sequence
  source: /note="Description of Artificial Sequence: Synthetic oligonucleotide"
  source: /note="Sense strand starting at position 2037 of SEQ ID NO: 3016"
agauuugucucugauauuc

SEQ ID NO: 3658 - RNA, 19 nt, Artificial Sequence
  source: /note="Description of Artificial Sequence: Synthetic oligonucleotide"
  source: /note="Antisense strand to SEQ ID NO: 3657"
gaauaucagagacaaaucu

SEQ ID NO: 3659 - RNA, 19 nt, Artificial Sequence
  source: /note="Description of Artificial Sequence: Synthetic oligonucleotide"
  source: /note="Sense strand starting at position 2037 of SEQ ID NO: 3214"
gggacugcuuaauagaaau

SEQ ID NO: 3660 - RNA, 19 nt, Artificial Sequence
  source: /note="Description of Artificial Sequence: Synthetic oligonucleotide"
  source: /note="Antisense strand to SEQ ID NO: 3659"
auuucuauuaagcaguccc

SEQ ID NO: 3661 - RNA, 19 nt, Artificial Sequence
  source: /note="Description of Artificial Sequence: Synthetic oligonucleotide"
  source: /note="Sense strand starting at position 2037 of SEQ ID NO: 3290"
ugucuucuguucuggguua

SEQ ID NO: 3662 - RNA, 19 nt, Artificial Sequence
  source: /note="Description of Artificial Sequence: Synthetic oligonucleotide"
  source: /note="Antisense strand to SEQ ID NO: 3661"
uaacccagaacagaagaca

SEQ ID NO: 3663 - RNA, 19 nt, Artificial Sequence
  source: /note="Description of Artificial Sequence: Synthetic oligonucleotide"
  source: /note="Sense strand starting at position 2037 of SEQ ID NO: 3362"
ggcucuuucuugguucuga

SEQ ID NO: 3664 - RNA, 19 nt, Artificial Sequence
  source: /note="Description of Artificial Sequence: Synthetic oligonucleotide"
  source: /note="Antisense strand to SEQ ID NO: 3663"
ucagaaccaagaaagagcc

SEQ ID NO: 3665 - RNA, 19 nt, Artificial Sequence
  source: /note="Description of Artificial Sequence: Synthetic oligonucleotide"
  source: /note="Sense strand starting at position 2037 of SEQ ID NO: 3363"
gcucuuucuugguucugaa

SEQ ID NO: 3666 - RNA, 19 nt, Artificial Sequence
  source: /note="Description of Artificial Sequence: Synthetic oligonucleotide"
  source: /note="Antisense strand to SEQ ID NO: 3665"
uucagaaccaagaaagagc

SEQ ID NO: 3667 - RNA, 19 nt, Artificial Sequence
  source: /note="Description of Artificial Sequence: Synthetic oligonucleotide"
  source: /note="Sense strand starting at position 2037 of SEQ ID NO: 3517"
cacggagcuucgcauugaa

SEQ ID NO: 3668 - RNA, 19 nt, Artificial Sequence
  source: /note="Description of Artificial Sequence: Synthetic oligonucleotide"
  source: /note="Antisense strand to SEQ ID NO: 3667"
uucaaugcgaagcuccgug

SEQ ID NO: 3669 - RNA, 19 nt, Artificial Sequence
  source: /note="Description of Artificial Sequence: Synthetic oligonucleotide"
  source: /note="Sense strand starting at position 2037 of SEQ ID NO: 3670"
ugcugaaaugcagaugguu

SEQ ID NO: 3670 - RNA, 19 nt, Artificial Sequence
  source: /note="Description of Artificial Sequence: Synthetic oligonucleotide"
  source: /note="Antisense strand to SEQ ID NO: 3669"
aaccaucugcauuucagca

SEQ ID NO: 3671 - RNA, 19 nt, Artificial Sequence
  source: /note="Description of Artificial Sequence: Synthetic oligonucleotide"
  source: /note="Sense strand starting at position 2037 of SEQ ID NO: 3739"
gcgggauucucccacaaau

SEQ ID NO: 3672 - RNA, 19 nt, Artificial Sequence
  source: /note="Description of Artificial Sequence: Synthetic oligonucleotide"
  source: /note="Antisense strand to SEQ ID NO: 3671"
auuugugggagaaucccgc

SEQ ID NO: 3673 - RNA, 19 nt, Artificial Sequence
  source: /note="Description of Artificial Sequence: Synthetic oligonucleotide"
  source: /note="Sense strand starting at position 2038 of SEQ ID NO: 187"
ucccuugucccagggaaac

SEQ ID NO: 3674 - RNA, 19 nt, Artificial Sequence
  source: /note="Description of Artificial Sequence: Synthetic oligonucleotide"
  source: /note="Antisense strand to SEQ ID NO: 3673"
guuucccugggacaaggga

SEQ ID NO: 3675 - RNA, 19 nt, Artificial Sequence
  source: /note="Description of Artificial Sequence: Synthetic oligonucleotide"
  source: /note="Sense strand starting at position 2038 of SEQ ID NO: 323"
cucuuuguccacuagucuu

SEQ ID NO: 3676 - RNA, 19 nt, Artificial Sequence
  source: /note="Description of Artificial Sequence: Synthetic oligonucleotide"
  source: /note="Antisense strand to SEQ ID NO: 3675"
aagacuaguggacaaagag

SEQ ID NO: 3677 - RNA, 19 nt, Artificial Sequence
  source: /note="Description of Artificial Sequence: Synthetic oligonucleotide"
  source: /note="Sense strand starting at position 2038 of SEQ ID NO: 449"
acauaacucuguuaggaua

SEQ ID NO: 3678 - RNA, 19 nt, Artificial Sequence
  source: /note="Description of Artificial Sequence: Synthetic oligonucleotide"
  source: /note="Antisense strand to SEQ ID NO: 3677"
uauccuaacagaguuaugu

SEQ ID NO: 3679 - RNA, 19 nt, Artificial Sequence
  source: /note="Description of Artificial Sequence: Synthetic oligonucleotide"
  source: /note="Sense strand starting at position 2038 of SEQ ID NO: 451"
auaacucuguuaggauagu

SEQ ID NO: 3680 - RNA, 19 nt, Artificial Sequence
  source: /note="Description of Artificial Sequence: Synthetic oligonucleotide"
  source: /note="Antisense strand to SEQ ID NO: 3679"
acuauccuaacagaguuau

SEQ ID NO: 3681 - RNA, 19 nt, Artificial Sequence
  source: /note="Description of Artificial Sequence: Synthetic oligonucleotide"
  source: /note="Sense strand starting at position 2038 of SEQ ID NO: 543"
aggcuaacagugugucgua

SEQ ID NO: 3682 - RNA, 19 nt, Artificial Sequence
  source: /note="Description of Artificial Sequence: Synthetic oligonucleotide"
  source: /note="Antisense strand to SEQ ID NO: 3681"
uacgacacacuguuagccu

SEQ ID NO: 3683 - RNA, 19 nt, Artificial Sequence
  source: /note="Description of Artificial Sequence: Synthetic oligonucleotide"
  source: /note="Sense strand starting at position 2038 of SEQ ID NO: 544"
ggcuaacagugugucguau

SEQ ID NO: 3684 - RNA, 19 nt, Artificial Sequence
  source: /note="Description of Artificial Sequence: Synthetic oligonucleotide"
  source: /note="Antisense strand to SEQ ID NO: 3683"
auacgacacacuguuagcc

SEQ ID NO: 3685 - RNA, 19 nt, Artificial Sequence
  source: /note="Description of Artificial Sequence: Synthetic oligonucleotide"
  source: /note="Sense strand starting at position 2038 of SEQ ID NO: 545"
gcuaacagugugucguaua

SEQ ID NO: 3686 - RNA, 19 nt, Artificial Sequence
  source: /note="Description of Artificial Sequence: Synthetic oligonucleotide"
  source: /note="Antisense strand to SEQ ID NO: 3685"
uauacgacacacuguuagc

SEQ ID NO: 3687 - RNA, 19 nt, Artificial Sequence
  source: /note="Description of Artificial Sequence: Synthetic oligonucleotide"
  source: /note="Sense strand starting at position 2038 of SEQ ID NO: 546"
cuaacagugugucguauaa

SEQ ID NO: 3688 - RNA, 19 nt, Artificial Sequence
  source: /note="Description of Artificial Sequence: Synthetic oligonucleotide"
  source: /note="Antisense strand to SEQ ID NO: 3687"
uuauacgacacacuguuag

SEQ ID NO: 3689 - RNA, 19 nt, Artificial Sequence
  source: /note="Description of Artificial Sequence: Synthetic oligonucleotide"
  source: /note="Sense strand starting at position 2038 of SEQ ID NO: 1288"
gugggaggcuggugauaua

SEQ ID NO: 3690 - RNA, 19 nt, Artificial Sequence
  source: /note="Description of Artificial Sequence: Synthetic oligonucleotide"
  source: /note="Antisense strand to SEQ ID NO: 3689"
uauaucaccagccucccac

SEQ ID NO: 3691 - RNA, 19 nt, Artificial Sequence
  source: /note="Description of Artificial Sequence: Synthetic oligonucleotide"
  source: /note="Sense strand starting at position 2038 of SEQ ID NO: 1347"
ggcagcccauuugaauaau

SEQ ID NO: 3692 - RNA, 19 nt, Artificial Sequence
  source: /note="Description of Artificial Sequence: Synthetic oligonucleotide"
  source: /note="Antisense strand to SEQ ID NO: 3691"
auuauucaaaugggcugcc

SEQ ID NO: 3693 - RNA, 19 nt, Artificial Sequence
  source: /note="Description of Artificial Sequence: Synthetic oligonucleotide"
  source: /note="Sense strand starting at position 2038 of SEQ ID NO: 1675"
cccggcagaucccuaugaa

SEQ ID NO: 3694 - RNA, 19 nt, Artificial Sequence
  source: /note="Description of Artificial Sequence: Synthetic oligonucleotide"
  source: /note="Antisense strand to SEQ ID NO: 3693"
uucauagggaucugccggg

SEQ ID NO: 3695 - RNA, 19 nt, Artificial Sequence
  source: /note="Description of Artificial Sequence: Synthetic oligonucleotide"
  source: /note="Sense strand starting at position 2038 of SEQ ID NO: 1676"
ccggcagaucccuaugaaa

SEQ ID NO: 3696 - RNA, 19 nt, Artificial Sequence
  source: /note="Description of Artificial Sequence: Synthetic oligonucleotide"
  source: /note="Antisense strand to SEQ ID NO: 3695"
uuucauagggaucugccgg

SEQ ID NO: 3697 - RNA, 19 nt, Artificial Sequence
  source: /note="Description of Artificial Sequence: Synthetic oligonucleotide"
  source: /note="Sense strand starting at position 2038 of SEQ ID NO: 1678"
ggcagaucccuaugaaagc

SEQ ID NO: 3698 - RNA, 19 nt, Artificial Sequence
  source: /note="Description of Artificial Sequence: Synthetic oligonucleotide"
  source: /note="Antisense strand to SEQ ID NO: 3697"
gcuuucauagggaucugcc

SEQ ID NO: 3699 - RNA, 19 nt, Artificial Sequence
  source: /note="Description of Artificial Sequence: Synthetic oligonucleotide"
  source: /note="Sense strand starting at position 2038 of SEQ ID NO: 1702"
uuauuuaugccggguuucu

SEQ ID NO: 3700 - RNA, 19 nt, Artificial Sequence
  source: /note="Description of Artificial Sequence: Synthetic oligonucleotide"
  source: /note="Antisense strand to SEQ ID NO: 3699"
agaaacccggcauaaauaa

SEQ ID NO: 3701 - RNA, 19 nt, Artificial Sequence
  source: /note="Description of Artificial Sequence: Synthetic oligonucleotide"
  source: /note="Sense strand starting at position 2038 of SEQ ID NO: 1711"
ccggguuucuucgcucuca

SEQ ID NO: 3702 - RNA, 19 nt, Artificial Sequence
  source: /note="Description of Artificial Sequence: Synthetic oligonucleotide"
  source: /note="Antisense strand to SEQ ID NO: 3701"
ugagagcgaagaaacccgg

SEQ ID NO: 3703 - RNA, 19 nt, Artificial Sequence
  source: /note="Description of Artificial Sequence: Synthetic oligonucleotide"
  source: /note="Sense strand starting at position 2038 of SEQ ID NO: 1713"
ggguuucuucgcucucagu

SEQ ID NO: 3704 - RNA, 19 nt, Artificial Sequence
  source: /note="Description of Artificial Sequence: Synthetic oligonucleotide"
  source: /note="Antisense strand to SEQ ID NO: 3703"
acugagagcgaagaaaccc

SEQ ID NO: 3705 - RNA, 19 nt, Artificial Sequence
  source: /note="Description of Artificial Sequence: Synthetic oligonucleotide"
  source: /note="Sense strand starting at position 2038 of SEQ ID NO: 1729"
agugcucauucucugucaa

SEQ ID NO: 3706 - RNA, 19 nt, Artificial Sequence
  source: /note="Description of Artificial Sequence: Synthetic oligonucleotide"
  source: /note="Antisense strand to SEQ ID NO: 3705"
uugacagagaaugagcacu

SEQ ID NO: 3707 - RNA, 19 nt, Artificial Sequence
  source: /note="Description of Artificial Sequence: Synthetic oligonucleotide"
  source: /note="Sense strand starting at position 2038 of SEQ ID NO: 1730"
gugcucauucucugucaaa

SEQ ID NO: 3708 - RNA, 19 nt, Artificial Sequence
  source: /note="Description of Artificial Sequence: Synthetic oligonucleotide"
  source: /note="Antisense strand to SEQ ID NO: 3707"
uuugacagagaaugagcac

SEQ ID NO: 3709 - RNA, 19 nt, Artificial Sequence
  source: /note="Description of Artificial Sequence: Synthetic oligonucleotide"
  source: /note="Sense strand starting at position 2038 of SEQ ID NO: 1773"
ugcaaagcgcuguccuauu

SEQ ID NO: 3710 - RNA, 19 nt, Artificial Sequence
  source: /note="Description of Artificial Sequence: Synthetic oligonucleotide"
  source: /note="Antisense strand to SEQ ID NO: 3709"
aauaggacagcgcuuugca

SEQ ID NO: 3711 - RNA, 19 nt, Artificial Sequence
  source: /note="Description of Artificial Sequence: Synthetic oligonucleotide"
  source: /note="Sense strand starting at position 2038 of SEQ ID NO: 2016"
agauuugucucugauauuc

SEQ ID NO: 3712 - RNA, 19 nt, Artificial Sequence
  source: /note="Description of Artificial Sequence: Synthetic oligonucleotide"
  source: /note="Antisense strand to SEQ ID NO: 3711"
gaauaucagagacaaaucu

SEQ ID NO: 3713 - RNA, 19 nt, Artificial Sequence
  source: /note="Description of Artificial Sequence: Synthetic oligonucleotide"
  source: /note="Sense strand starting at position 2038 of SEQ ID NO: 2214"
gggacugcuuaauagaaau

SEQ ID NO: 3714 - RNA, 19 nt, Artificial Sequence
  source: /note="Description of Artificial Sequence: Synthetic oligonucleotide"
  source: /note="Antisense strand to SEQ ID NO: 3713"
auuucuauuaagcaguccc

SEQ ID NO: 3715 - RNA, 19 nt, Artificial Sequence
  source: /note="Description of Artificial Sequence: Synthetic oligonucleotide"
  source: /note="Sense strand starting at position 2038 of SEQ ID NO: 2290"
ugucuucuguucuggguua

SEQ ID NO: 3716 - RNA, 19 nt, Artificial Sequence
  source: /note="Description of Artificial Sequence: Synthetic oligonucleotide"
  source: /note="Antisense strand to SEQ ID NO: 3715"
uaacccagaacagaagaca

SEQ ID NO: 3717 - RNA, 19 nt, Artificial Sequence
  source: /note="Description of Artificial Sequence: Synthetic oligonucleotide"
  source: /note="Sense strand starting at position 2038 of SEQ ID NO: 2362"
ggcucuuucuugguucuga

SEQ ID NO: 3718 - RNA, 19 nt, Artificial Sequence
  source: /note="Description of Artificial Sequence: Synthetic oligonucleotide"
  source: /note="Antisense strand to SEQ ID NO: 3717"
ucagaaccaagaaagagcc

SEQ ID NO: 3719 - RNA, 19 nt, Artificial Sequence
  source: /note="Description of Artificial Sequence: Synthetic oligonucleotide"
  source: /note="Sense strand starting at position 2038 of SEQ ID NO: 2363"
gcucuuucuugguucugaa

SEQ ID NO: 3720 - RNA, 19 nt, Artificial Sequence
  source: /note="Description of Artificial Sequence: Synthetic oligonucleotide"
  source: /note="Antisense strand to SEQ ID NO: 3719"
uucagaaccaagaaagagc

SEQ ID NO: 3721 - RNA, 19 nt, Artificial Sequence
  source: /note="Description of Artificial Sequence: Synthetic oligonucleotide"
  source: /note="Sense strand starting at position 2038 of SEQ ID NO: 2517"
cacggagcuucgcauugaa

SEQ ID NO: 3722 - RNA, 19 nt, Artificial Sequence
  source: /note="Description of Artificial Sequence: Synthetic oligonucleotide"
  source: /note="Antisense strand to SEQ ID NO: 3721"
uucaaugcgaagcuccgug

SEQ ID NO: 3723 - RNA, 19 nt, Artificial Sequence
  source: /note="Description of Artificial Sequence: Synthetic oligonucleotide"
  source: /note="Sense strand starting at position 2038 of SEQ ID NO: 2670"
ugcugaaaugcagaugguu

SEQ ID NO: 3724 - RNA, 19 nt, Artificial Sequence
  source: /note="Description of Artificial Sequence: Synthetic oligonucleotide"
  source: /note="Antisense strand to SEQ ID NO: 3723"
aaccaucugcauuucagca

SEQ ID NO: 3725 - RNA, 19 nt, Artificial Sequence
  source: /note="Description of Artificial Sequence: Synthetic oligonucleotide"
  source: /note="Sense strand starting at position 2038 of SEQ ID NO: 2739"
gcgggauucucccacaaau

SEQ ID NO: 3726 - RNA, 19 nt, Artificial Sequence
  source: /note="Description of Artificial Sequence: Synthetic oligonucleotide"
  source: /note="Antisense strand to SEQ ID NO: 3725"
auuugugggagaaucccgc

SEQ ID NO: 3727 - RNA, 19 nt, Artificial Sequence
  source: /note="Description of Artificial Sequence: Synthetic oligonucleotide"
  source: /note="Sense strand starting at position 2038 of SEQ ID NO: 2997"
aggaguaagcauuggagcu

SEQ ID NO: 3728 - RNA, 19 nt, Artificial Sequence
  source: /note="Description of Artificial Sequence: Synthetic oligonucleotide"
  source: /note="Antisense strand to SEQ ID NO: 3727"
agcuccaaugcuuacuccu

SEQ ID NO: 3729 - RNA, 19 nt, Artificial Sequence
  source: /note="Description of Artificial Sequence: Synthetic oligonucleotide"
  source: /note="Sense strand starting at position 2038 of SEQ ID NO: 3106"
gaauguuaugguugaccua

SEQ ID NO: 3730 - RNA, 19 nt, Artificial Sequence
  source: /note="Description of Artificial Sequence: Synthetic oligonucleotide"
  source: /note="Antisense strand to SEQ ID NO: 3729"
uaggucaaccauaacauuc

SEQ ID NO: 3731 - RNA, 19 nt, Artificial Sequence
  source: /note="Description of Artificial Sequence: Synthetic oligonucleotide"
  source: /note="Sense strand starting at position 2038 of SEQ ID NO: 3129"
gugcgugugcuguaugaga

SEQ ID NO: 3732 - RNA, 19 nt, Artificial Sequence
  source: /note="Description of Artificial Sequence: Synthetic oligonucleotide"
  source: /note="Antisense strand to SEQ ID NO: 3731"
ucucauacagcacacgcac

SEQ ID NO: 3733 - RNA, 19 nt, Artificial Sequence
  source: /note="Description of Artificial Sequence: Synthetic oligonucleotide"
  source: /note="Sense strand starting at position 2038 of SEQ ID NO: 3131"
gcgugugcuguaugagagu

SEQ ID NO: 3734 - RNA, 19 nt, Artificial Sequence
  source: /note="Description of Artificial Sequence: Synthetic oligonucleotide"
  source: /note="Antisense strand to SEQ ID NO: 3733"
acucucauacagcacacgc

SEQ ID NO: 3735 - RNA, 19 nt, Artificial Sequence
  source: /note="Description of Artificial Sequence: Synthetic oligonucleotide"
  source: /note="Sense strand starting at position 2038 of SEQ ID NO: 3134"
ugugcuguaugagaguauu

SEQ ID NO: 3736 - RNA, 19 nt, Artificial Sequence
  source: /note="Description of Artificial Sequence: Synthetic oligonucleotide"
  source: /note="Antisense strand to SEQ ID NO: 3735"
aauacucucauacagcaca

SEQ ID NO: 3737 - RNA, 19 nt, Artificial Sequence
  source: /note="Description of Artificial Sequence: Synthetic oligonucleotide"
  source: /note="Sense strand starting at position 2038 of SEQ ID NO: 3144"
gagaguauuugugagcuua

SEQ ID NO: 3738 - RNA, 19 nt, Artificial Sequence
  source: /note="Description of Artificial Sequence: Synthetic oligonucleotide"
  source: /note="Antisense strand to SEQ ID NO: 3737"
uaagcucacaaauacucuc

SEQ ID NO: 3739 - RNA, 19 nt, Artificial Sequence
  source: /note="Description of Artificial Sequence: Synthetic oligonucleotide"
  source: /note="Sense strand starting at position 2038 of SEQ ID NO: 3414"
cgacccgaguccucauuua

SEQ ID NO: 3740 - RNA, 19 nt, Artificial Sequence
  source: /note="Description of Artificial Sequence: Synthetic oligonucleotide"
  source: /note="Antisense strand to SEQ ID NO: 3739"
uaaaugaggacucgggucg

SEQ ID NO: 3741 - RNA, 19 nt, Artificial Sequence
  source: /note="Description of Artificial Sequence: Synthetic oligonucleotide"
  source: /note="Sense strand starting at position 2038 of SEQ ID NO: 3836"
aagggcuauccagaguucu

SEQ ID NO: 3742 - RNA, 19 nt, Artificial Sequence
  source: /note="Description of Artificial Sequence: Synthetic oligonucleotide"
  source: /note="Antisense strand to SEQ ID NO: 3741"
agaacucuggauagcccuu

SEQ ID NO: 3743 - RNA, 19 nt, Artificial Sequence
  source: /note="Description of Artificial Sequence: Synthetic oligonucleotide"
  source: /note="Sense strand starting at position 2038 of SEQ ID NO: 3842"
uauccagaguucuggcuca

SEQ ID NO: 3744 - RNA, 19 nt, Artificial Sequence
  source: /note="Description of Artificial Sequence: Synthetic oligonucleotide"
  source: /note="Antisense strand to SEQ ID NO: 3743"
ugagccagaacucuggaua

SEQ ID NO: 3745 - RNA, 19 nt, Artificial Sequence
  source: /note="Description of Artificial Sequence: Synthetic oligonucleotide"
  source: /note="Sense strand starting at position 2038 of SEQ ID NO: 3847"
agaguucuggcucaggcuu

SEQ ID NO: 3746 - RNA, 19 nt, Artificial Sequence
  source: /note="Description of Artificial Sequence: Synthetic oligonucleotide"
  source: /note="Antisense strand to SEQ ID NO: 3745"
aagccugagccagaacucu

SEQ ID NO: 3747 - RNA, 19 nt, Artificial Sequence
  source: /note="Description of Artificial Sequence: Synthetic oligonucleotide"
  source: /note="Sense strand starting at position 2038 of SEQ ID NO: 3860"
aggcuugaaugcugaagau

SEQ ID NO: 3748 - RNA, 19 nt, Artificial Sequence
  source: /note="Description of Artificial Sequence: Synthetic oligonucleotide"
  source: /note="Antisense strand to SEQ ID NO: 3747"
aucuucagcauucaagccu

SEQ ID NO: 3749 - RNA, 19 nt, Artificial Sequence
  source: /note="Description of Artificial Sequence: Synthetic oligonucleotide"
  source: /note="Sense strand starting at position 2038 of SEQ ID NO: 3870"
gcugaagauugcucccgga

SEQ ID NO: 3750 - RNA, 19 nt, Artificial Sequence
  source: /note="Description of Artificial Sequence: Synthetic oligonucleotide"
  source: /note="Antisense strand to SEQ ID NO: 3749"
uccgggagcaaucuucagc

SEQ ID NO: 3751 - RNA, 19 nt, Artificial Sequence
  source: /note="Description of Artificial Sequence: Synthetic oligonucleotide"
  source: /note="Sense strand starting at position 2038 of SEQ ID NO: 3873"
gaagauugcucccggaguu

SEQ ID NO: 3752 - RNA, 19 nt, Artificial Sequence
  source: /note="Description of Artificial Sequence: Synthetic oligonucleotide"
  source: /note="Antisense strand to SEQ ID NO: 3751"
aacuccgggagcaaucuuc

SEQ ID NO: 3753 - RNA, 19 nt, Artificial Sequence
  source: /note="Description of Artificial Sequence: Synthetic oligonucleotide"
  source: /note="Sense strand starting at position 2038 of SEQ ID NO: 3874"
aagauugcucccggaguuu

SEQ ID NO: 3754 - RNA, 19 nt, Artificial Sequence
  source: /note="Description of Artificial Sequence: Synthetic oligonucleotide"
  source: /note="Antisense strand to SEQ ID NO: 3753"
aaacuccgggagcaaucuu

SEQ ID NO: 3755 - RNA, 19 nt, Artificial Sequence
  source: /note="Description of Artificial Sequence: Synthetic oligonucleotide"
  source: /note="Sense strand starting at position 2038 of SEQ ID NO: 3885"
cggaguuucucuccaggaa

SEQ ID NO: 3756 - RNA, 19 nt, Artificial Sequence
  source: /note="Description of Artificial Sequence: Synthetic oligonucleotide"
  source: /note="Antisense strand to SEQ ID NO: 3755"
uuccuggagagaaacuccg

SEQ ID NO: 3757 - RNA, 19 nt, Artificial Sequence
  source: /note="Description of Artificial Sequence: Synthetic oligonucleotide"
  source: /note="Sense strand starting at position 2038 of SEQ ID NO: 3926"
ugcagauguuucucccaau

SEQ ID NO: 3758 - RNA, 19 nt, Artificial Sequence
  source: /note="Description of Artificial Sequence: Synthetic oligonucleotide"
  source: /note="Antisense strand to SEQ ID NO: 3757"
auugggagaaacaucugca

SEQ ID NO: 3759 - RNA, 19 nt, Artificial Sequence
  source: /note="Description of Artificial Sequence: Synthetic oligonucleotide"
  source: /note="Sense strand starting at position 2038 of SEQ ID NO: 3927"
gcagauguuucucccaauc

SEQ ID NO: 3760 - RNA, 19 nt, Artificial Sequence
  source: /note="Description of Artificial Sequence: Synthetic oligonucleotide"
  source: /note="Antisense strand to SEQ ID NO: 3759"
gauugggagaaacaucugc

SEQ ID NO: 3761 - RNA, 19 nt, Artificial Sequence
  source: /note="Description of Artificial Sequence: Synthetic oligonucleotide"
  source: /note="Sense strand starting at position 2039 of SEQ ID NO: 229"
cuauauauguaauggcuga

SEQ ID NO: 3762 - RNA, 19 nt, Artificial Sequence
  source: /note="Description of Artificial Sequence: Synthetic oligonucleotide"
  source: /note="Antisense strand to SEQ ID NO: 3761"
ucagccauuacauauauag

SEQ ID NO: 3763 - RNA, 19 nt, Artificial Sequence
  source: /note="Description of Artificial Sequence: Synthetic oligonucleotide"
  source: /note="Sense strand starting at position 2039 of SEQ ID NO: 440"
ccugucauguugggaaaua

SEQ ID NO: 3764 - RNA, 19 nt, Artificial Sequence
  source: /note="Description of Artificial Sequence: Synthetic oligonucleotide"
  source: /note="Antisense strand to SEQ ID NO: 3763"
uauuucccaacaugacagg

SEQ ID NO: 3765 - RNA, 19 nt, Artificial Sequence
  source: /note="Description of Artificial Sequence: Synthetic oligonucleotide"
  source: /note="Sense strand starting at position 2039 of SEQ ID NO: 441"
cugucauguugggaaauaa

SEQ ID NO: 3766 - RNA, 19 nt, Artificial Sequence
  source: /note="Description of Artificial Sequence: Synthetic oligonucleotide"
  source: /note="Antisense strand to SEQ ID NO: 3765"
uuauuucccaacaugacag

SEQ ID NO: 3767 - RNA, 19 nt, Artificial Sequence
  source: /note="Description of Artificial Sequence: Synthetic oligonucleotide"
  source: /note="Sense strand starting at position 2039 of SEQ ID NO: 714"
ucuuguccaucaugaaaga

SEQ ID NO: 3768 - RNA, 19 nt, Artificial Sequence
  source: /note="Description of Artificial Sequence: Synthetic oligonucleotide"
  source: /note="Antisense strand to SEQ ID NO: 3767"
ucuuucaugauggacaaga

SEQ ID NO: 3769 - RNA, 19 nt, Artificial Sequence
  source: /note="Description of Artificial Sequence: Synthetic oligonucleotide"
  source: /note="Sense strand starting at position 2039 of SEQ ID NO: 724"
caugaaagaucauguguuc

SEQ ID NO: 3770 - RNA, 19 nt, Artificial Sequence
  source: /note="Description of Artificial Sequence: Synthetic oligonucleotide"
  source: /note="Antisense strand to SEQ ID NO: 3769"
gaacacaugaucuuucaug

SEQ ID NO: 3771 - RNA, 19 nt, Artificial Sequence
  source: /note="Description of Artificial Sequence: Synthetic oligonucleotide"
  source: /note="Sense strand starting at position 2039 of SEQ ID NO: 882"
cugugcuaagccugcagaa

SEQ ID NO: 3772 - RNA, 19 nt, Artificial Sequence
  source: /note="Description of Artificial Sequence: Synthetic oligonucleotide"
  source: /note="Antisense strand to SEQ ID NO: 3771"
uucugcaggcuuagcacag

SEQ ID NO: 3773 - RNA, 19 nt, Artificial Sequence
  source: /note="Description of Artificial Sequence: Synthetic oligonucleotide"
  source: /note="Sense strand starting at position 2039 of SEQ ID NO: 927"
cuguuugcuuccugaauau

SEQ ID NO: 3774 - RNA, 19 nt, Artificial Sequence
  source: /note="Description of Artificial Sequence: Synthetic oligonucleotide"
  source: /note="Antisense strand to SEQ ID NO: 3773"
auauucaggaagcaaacag

SEQ ID NO: 3775 - RNA, 19 nt, Artificial Sequence
  source: /note="Description of Artificial Sequence: Synthetic oligonucleotide"
  source: /note="Sense strand starting at position 2039 of SEQ ID NO: 999"
gguugacaauggugugaag

SEQ ID NO: 3776 - RNA, 19 nt, Artificial Sequence
  source: /note="Description of Artificial Sequence: Synthetic oligonucleotide"
  source: /note="Antisense strand to SEQ ID NO: 3775"
cuucacaccauugucaacc

SEQ ID NO: 3777 - RNA, 19 nt, Artificial Sequence
  source: /note="Description of Artificial Sequence: Synthetic oligonucleotide"
  source: /note="Sense strand starting at position 2039 of SEQ ID NO: 1071"
ucaguuaagugcucagcuu

SEQ ID NO: 3778 - RNA, 19 nt, Artificial Sequence
  source: /note="Description of Artificial Sequence: Synthetic oligonucleotide"
  source: /note="Antisense strand to SEQ ID NO: 3777"
aagcugagcacuuaacuga

SEQ ID NO: 3779 - RNA, 19 nt, Artificial Sequence
  source: /note="Description of Artificial Sequence: Synthetic oligonucleotide"
  source: /note="Sense strand starting at position 2039 of SEQ ID NO: 1166"
cggcgacauuacuauuauu

SEQ ID NO: 3780 - RNA, 19 nt, Artificial Sequence
  source: /note="Description of Artificial Sequence: Synthetic oligonucleotide"
  source: /note="Antisense strand to SEQ ID NO: 3779"
aauaauaguaaugucgccg

SEQ ID NO: 3781 - RNA, 19 nt, Artificial Sequence
  source: /note="Description of Artificial Sequence: Synthetic oligonucleotide"
  source: /note="Sense strand starting at position 2039 of SEQ ID NO: 1353"
gaaagagagucugagugua

SEQ ID NO: 3782 - RNA, 19 nt, Artificial Sequence
  source: /note="Description of Artificial Sequence: Synthetic oligonucleotide"
  source: /note="Antisense strand to SEQ ID NO: 3781"
uacacucagacucucuuuc

SEQ ID NO: 3783 - RNA, 19 nt, Artificial Sequence
  source: /note="Description of Artificial Sequence: Synthetic oligonucleotide"
  source: /note="Sense strand starting at position 2039 of SEQ ID NO: 1594"
ccaucuacguaucaauuga

SEQ ID NO: 3784 - RNA, 19 nt, Artificial Sequence
  source: /note="Description of Artificial Sequence: Synthetic oligonucleotide"
  source: /note="Antisense strand to SEQ ID NO: 3783"
ucaauugauacguagaugg

SEQ ID NO: 3785 - RNA, 19 nt, Artificial Sequence
  source: /note="Description of Artificial Sequence: Synthetic oligonucleotide"
  source: /note="Sense strand starting at position 2039 of SEQ ID NO: 1601"
cguaucaauugaugaauuc

SEQ ID NO: 3786 - RNA, 19 nt, Artificial Sequence
  source: /note="Description of Artificial Sequence: Synthetic oligonucleotide"
  source: /note="Antisense strand to SEQ ID NO: 3785"
gaauucaucaauugauacg

SEQ ID NO: 3787 - RNA, 19 nt, Artificial Sequence
  source: /note="Description of Artificial Sequence: Synthetic oligonucleotide"
  source: /note="Sense strand starting at position 2039 of SEQ ID NO: 1864"
cagccuggcuugugggaaa

SEQ ID NO: 3788 - RNA, 19 nt, Artificial Sequence
  source: /note="Description of Artificial Sequence: Synthetic oligonucleotide"
  source: /note="Antisense strand to SEQ ID NO: 3787"
uuucccacaagccaggcug

SEQ ID NO: 3789 - RNA, 19 nt, Artificial Sequence
  source: /note="Description of Artificial Sequence: Synthetic oligonucleotide"
  source: /note="Sense strand starting at position 2039 of SEQ ID NO: 1875"
gugggaaacugucacguau

SEQ ID NO: 3790 - RNA, 19 nt, Artificial Sequence
  source: /note="Description of Artificial Sequence: Synthetic oligonucleotide"
  source: /note="Antisense strand to SEQ ID NO: 3789"
auacgugacaguuucccac

SEQ ID NO: 3791 - RNA, 19 nt, Artificial Sequence
  source: /note="Description of Artificial Sequence: Synthetic oligonucleotide"
  source: /note="Sense strand starting at position 2039 of SEQ ID NO: 1877"
gggaaacugucacguauca

SEQ ID NO: 3792 - RNA, 19 nt, Artificial Sequence
  source: /note="Description of Artificial Sequence: Synthetic oligonucleotide"
  source: /note="Antisense strand to SEQ ID NO: 3791"
ugauacgugacaguuuccc

SEQ ID NO: 3793 - RNA, 19 nt, Artificial Sequence
  source: /note="Description of Artificial Sequence: Synthetic oligonucleotide"
  source: /note="Sense strand starting at position 2039 of SEQ ID NO: 1989"
augagugugugcgcugaua

SEQ ID NO: 3794 - RNA, 19 nt, Artificial Sequence
  source: /note="Description of Artificial Sequence: Synthetic oligonucleotide"
  source: /note="Antisense strand to SEQ ID NO: 3793"
uaucagcgcacacacucau

SEQ ID NO: 3795 - RNA, 19 nt, Artificial Sequence
  source: /note="Description of Artificial Sequence: Synthetic oligonucleotide"
  source: /note="Sense strand starting at position 2039 of SEQ ID NO: 1991"
gagugugugcgcugauaau

SEQ ID NO: 3796 - RNA, 19 nt, Artificial Sequence
  source: /note="Description of Artificial Sequence: Synthetic oligonucleotide"
  source: /note="Antisense strand to SEQ ID NO: 3795"
auuaucagcgcacacacuc

SEQ ID NO: 3797 - RNA, 19 nt, Artificial Sequence
  source: /note="Description of Artificial Sequence: Synthetic oligonucleotide"
  source: /note="Sense strand starting at position 2039 of SEQ ID NO: 2067"
uuucuugauuaugagacuu

SEQ ID NO: 3798 - RNA, 19 nt, Artificial Sequence
  source: /note="Description of Artificial Sequence: Synthetic oligonucleotide"
  source: /note="Antisense strand to SEQ ID NO: 3797"
aagucucauaaucaagaaa

SEQ ID NO: 3799 - RNA, 19 nt, Artificial Sequence
  source: /note="Description of Artificial Sequence: Synthetic oligonucleotide"
  source: /note="Sense strand starting at position 2039 of SEQ ID NO: 2069"
ucuugauuaugagacuuaa

SEQ ID NO: 3800 - RNA, 19 nt, Artificial Sequence
  source: /note="Description of Artificial Sequence: Synthetic oligonucleotide"
  source: /note="Antisense strand to SEQ ID NO: 3799"
uuaagucucauaaucaaga

SEQ ID NO: 3801 - RNA, 19 nt, Artificial Sequence
  source: /note="Description of Artificial Sequence: Synthetic oligonucleotide"
  source: /note="Sense strand starting at position 2039 of SEQ ID NO: 2183"
augagauaauagggcucau

SEQ ID NO: 3802 - RNA, 19 nt, Artificial Sequence
  source: /note="Description of Artificial Sequence: Synthetic oligonucleotide"
  source: /note="Antisense strand to SEQ ID NO: 3801"
augagcccuauuaucucau

SEQ ID NO: 3803 - RNA, 19 nt, Artificial Sequence
  source: /note="Description of Artificial Sequence: Synthetic oligonucleotide"
  source: /note="Sense strand starting at position 2039 of SEQ ID NO: 2302"
gagacaccauucugugagu

SEQ ID NO: 3804 - RNA, 19 nt, Artificial Sequence
  source: /note="Description of Artificial Sequence: Synthetic oligonucleotide"
  source: /note="Antisense strand to SEQ ID NO: 3803"
acucacagaauggugucuc

SEQ ID NO: 3805 - RNA, 19 nt, Artificial Sequence
  source: /note="Description of Artificial Sequence: Synthetic oligonucleotide"
  source: /note="Sense strand starting at position 2039 of SEQ ID NO: 2305"
acaccauucugugagugag

SEQ ID NO: 3806 - RNA, 19 nt, Artificial Sequence
  source: /note="Description of Artificial Sequence: Synthetic oligonucleotide"
  source: /note="Antisense strand to SEQ ID NO: 3805"
cucacucacagaauggugu

SEQ ID NO: 3807 - RNA, 19 nt, Artificial Sequence
  source: /note="Description of Artificial Sequence: Synthetic oligonucleotide"
  source: /note="Sense strand starting at position 2039 of SEQ ID NO: 2311"
uucugugagugagaggaua

SEQ ID NO: 3808 - RNA, 19 nt, Artificial Sequence
  source: /note="Description of Artificial Sequence: Synthetic oligonucleotide"
  source: /note="Antisense strand to SEQ ID NO: 3807"
uauccucucacucacagaa

SEQ ID NO: 3809 - RNA, 19 nt, Artificial Sequence
  source: /note="Description of Artificial Sequence: Synthetic oligonucleotide"
  source: /note="Sense strand starting at position 2039 of SEQ ID NO: 2612"
cuugaagagucggagaauc

SEQ ID NO: 3810 - RNA, 19 nt, Artificial Sequence
  source: /note="Description of Artificial Sequence: Synthetic oligonucleotide"
  source: /note="Antisense strand to SEQ ID NO: 3809"
gauucuccgacucuucaag

SEQ ID NO: 3811 - RNA, 19 nt, Artificial Sequence
  source: /note="Description of Artificial Sequence: Synthetic oligonucleotide"
  source: /note="Sense strand starting at position 2039 of SEQ ID NO: 2638"
cccagaaucuacugacagu

SEQ ID NO: 3812 - RNA, 19 nt, Artificial Sequence
  source: /note="Description of Artificial Sequence: Synthetic oligonucleotide"
  source: /note="Antisense strand to SEQ ID NO: 3811"
acugucaguagauucuggg

SEQ ID NO: 3813 - RNA, 19 nt, Artificial Sequence
  source: /note="Description of Artificial Sequence: Synthetic oligonucleotide"
  source: /note="Sense strand starting at position 2039 of SEQ ID NO: 2648"
acugacaguuacugaauga

SEQ ID NO: 3814 - RNA, 19 nt, Artificial Sequence
  source: /note="Description of Artificial Sequence: Synthetic oligonucleotide"
  source: /note="Antisense strand to SEQ ID NO: 3813"
ucauucaguaacugucagu

SEQ ID NO: 3815 - RNA, 19 nt, Artificial Sequence
  source: /note="Description of Artificial Sequence: Synthetic oligonucleotide"
  source: /note="Sense strand starting at position 2039 of SEQ ID NO: 2655"
guuacugaaugaggaaaga

SEQ ID NO: 3816 - RNA, 19 nt, Artificial Sequence
  source: /note="Description of Artificial Sequence: Synthetic oligonucleotide"
  source: /note="Antisense strand to SEQ ID NO: 3815"
ucuuuccucauucaguaac

SEQ ID NO: 3817 - RNA, 19 nt, Artificial Sequence
  source: /note="Description of Artificial Sequence: Synthetic oligonucleotide"
  source: /note="Sense strand starting at position 2039 of SEQ ID NO: 2704"
gcuugagugcccugaccca

SEQ ID NO: 3818 - RNA, 19 nt, Artificial Sequence
  source: /note="Description of Artificial Sequence: Synthetic oligonucleotide"
  source: /note="Antisense strand to SEQ ID NO: 3817"
ugggucagggcacucaagc

SEQ ID NO: 3819 - RNA, 19 nt, Artificial Sequence
  source: /note="Description of Artificial Sequence: Synthetic oligonucleotide"
  source: /note="Sense strand starting at position 2039 of SEQ ID NO: 2931"
cucaguagcugauguuuau

SEQ ID NO: 3820 - RNA, 19 nt, Artificial Sequence
  source: /note="Description of Artificial Sequence: Synthetic oligonucleotide"
  source: /note="Antisense strand to SEQ ID NO: 3819"
auaaacaucagcuacugag

SEQ ID NO: 3821 - RNA, 19 nt, Artificial Sequence
  source: /note="Description of Artificial Sequence: Synthetic oligonucleotide"
  source: /note="Sense strand starting at position 2039 of SEQ ID NO: 2968"
cagauacagugcugaacau

SEQ ID NO: 3822 - RNA, 19 nt, Artificial Sequence
  source: /note="Description of Artificial Sequence: Synthetic oligonucleotide"
  source: /note="Antisense strand to SEQ ID NO: 3821"
auguucagcacuguaucug

SEQ ID NO: 3823 - RNA, 19 nt, Artificial Sequence
  source: /note="Description of Artificial Sequence: Synthetic oligonucleotide"
  source: /note="Sense strand starting at position 2039 of SEQ ID NO: 2979"
cugaacaugucucacaagu

SEQ ID NO: 3824 - RNA, 19 nt, Artificial Sequence
  source: /note="Description of Artificial Sequence: Synthetic oligonucleotide"
  source: /note="Antisense strand to SEQ ID NO: 3823"
acuugugagacauguucag

SEQ ID NO: 3825 - RNA, 19 nt, Artificial Sequence
  source: /note="Description of Artificial Sequence: Synthetic oligonucleotide"
  source: /note="Sense strand starting at position 2039 of SEQ ID NO: 2981"
gaacaugucucacaaguga

SEQ ID NO: 3826 - RNA, 19 nt, Artificial Sequence
  source: /note="Description of Artificial Sequence: Synthetic oligonucleotide"
  source: /note="Antisense strand to SEQ ID NO: 3825"
ucacuugugagacauguuc

SEQ ID NO: 3827 - RNA, 19 nt, Artificial Sequence
  source: /note="Description of Artificial Sequence: Synthetic oligonucleotide"
  source: /note="Sense strand starting at position 2039 of SEQ ID NO: 3047"
uuguauuccuguuauacag

SEQ ID NO: 3828 - RNA, 19 nt, Artificial Sequence
  source: /note="Description of Artificial Sequence: Synthetic oligonucleotide"
  source: /note="Antisense strand to SEQ ID NO: 3827"
cuguauaacaggaauacaa

SEQ ID NO: 3829 - RNA, 19 nt, Artificial Sequence
  source: /note="Description of Artificial Sequence: Synthetic oligonucleotide"
  source: /note="Sense strand starting at position 2039 of SEQ ID NO: 3049"
guauuccuguuauacagau

SEQ ID NO: 3830 - RNA, 19 nt, Artificial Sequence
  source: /note="Description of Artificial Sequence: Synthetic oligonucleotide"
  source: /note="Antisense strand to SEQ ID NO: 3829"
aucuguauaacaggaauac

SEQ ID NO: 3831 - RNA, 19 nt, Artificial Sequence
  source: /note="Description of Artificial Sequence: Synthetic oligonucleotide"
  source: /note="Sense strand starting at position 2039 of SEQ ID NO: 3179"
acuugauguucucagguuu

SEQ ID NO: 3832 - RNA, 19 nt, Artificial Sequence
  source: /note="Description of Artificial Sequence: Synthetic oligonucleotide"
  source: /note="Antisense strand to SEQ ID NO: 3831"
aaaccugagaacaucaagu

SEQ ID NO: 3833 - RNA, 19 nt, Artificial Sequence
  source: /note="Description of Artificial Sequence: Synthetic oligonucleotide"
  source: /note="Sense strand starting at position 2039 of SEQ ID NO: 3196"
uuuaaauucuaggauguga

SEQ ID NO: 3834 - RNA, 19 nt, Artificial Sequence
  source: /note="Description of Artificial Sequence: Synthetic oligonucleotide"
  source: /note="Antisense strand to SEQ ID NO: 3833"
ucacauccuagaauuuaaa

SEQ ID NO: 3835 - RNA, 19 nt, Artificial Sequence
  source: /note="Description of Artificial Sequence: Synthetic oligonucleotide"
  source: /note="Sense strand starting at position 2039 of SEQ ID NO: 3791"
gguugaggcuucugaguug

SEQ ID NO: 3836 - RNA, 19 nt, Artificial Sequence
  source: /note="Description of Artificial Sequence: Synthetic oligonucleotide"
  source: /note="Antisense strand to SEQ ID NO: 3835"
caacucagaagccucaacc

SEQ ID NO: 3837 - RNA, 19 nt, Artificial Sequence
  source: /note="Description of Artificial Sequence: Synthetic oligonucleotide"
  source: /note="Sense strand starting at position 2039 of SEQ ID NO: 3802"
cugaguuggugggacacau

SEQ ID NO: 3838 - RNA, 19 nt, Artificial Sequence
  source: /note="Description of Artificial Sequence: Synthetic oligonucleotide"
  source: /note="Antisense strand to SEQ ID NO: 3837"
augugucccaccaacucag

SEQ ID NO: 3839 - RNA, 19 nt, Artificial Sequence
  source: /note="Description of Artificial Sequence: Synthetic oligonucleotide"
  source: /note="Sense strand starting at position 2039 of SEQ ID NO: 3920"
gcagguguuuaacagaugu

SEQ ID NO: 3840 - RNA, 19 nt, Artificial Sequence
  source: /note="Description of Artificial Sequence: Synthetic oligonucleotide"
  source: /note="Antisense strand to SEQ ID NO: 3839"
acaucuguuaaacaccugc

SEQ ID NO: 3841 - RNA, 19 nt, Artificial Sequence
  source: /note="Description of Artificial Sequence: Synthetic oligonucleotide"
  source: /note="Sense strand starting at position 2039 of SEQ ID NO: 3976"
gcaugcaugucaggaagga

SEQ ID NO: 3842 - RNA, 19 nt, Artificial Sequence
  source: /note="Description of Artificial Sequence: Synthetic oligonucleotide"
  source: /note="Antisense strand to SEQ ID NO: 3841"
uccuuccugacaugcaugc

SEQ ID NO: 3843 - RNA, 19 nt, Artificial Sequence
  source: /note="Description of Artificial Sequence: Synthetic oligonucleotide"
  source: /note="Sense strand starting at position 2041 of SEQ ID NO: 39"
acagcugucugagagauaa

SEQ ID NO: 3844 - RNA, 19 nt, Artificial Sequence
  source: /note="Description of Artificial Sequence: Synthetic oligonucleotide"
  source: /note="Antisense strand to SEQ ID NO: 3843"
uuaucucucagacagcugu

SEQ ID NO: 3845 - RNA, 19 nt, Artificial Sequence
  source: /note="Description of Artificial Sequence: Synthetic oligonucleotide"
  source: /note="Sense strand starting at position 2041 of SEQ ID NO: 49"
gagagauaauaguagaaca

SEQ ID NO: 3846 - RNA, 19 nt, Artificial Sequence
  source: /note="Description of Artificial Sequence: Synthetic oligonucleotide"
  source: /note="Antisense strand to SEQ ID NO: 3845"
uguucuacuauuaucucuc

SEQ ID NO: 3847 - RNA, 19 nt, Artificial Sequence
  source: /note="Description of Artificial Sequence: Synthetic oligonucleotide"
  source: /note="Sense strand starting at position 2041 of SEQ ID NO: 97"
ccaccuaccugucgauaga

SEQ ID NO: 3848 - RNA, 19 nt, Artificial Sequence
  source: /note="Description of Artificial Sequence: Synthetic oligonucleotide"
  source: /note="Antisense strand to SEQ ID NO: 3847"
ucuaucgacagguaggugg

SEQ ID NO: 3849 - RNA, 19 nt, Artificial Sequence
  source: /note="Description of Artificial Sequence: Synthetic oligonucleotide"
  source: /note="Sense strand starting at position 2041 of SEQ ID NO: 125"
ucuaauaauugcugaaugu

SEQ ID NO: 3850 - RNA, 19 nt, Artificial Sequence
  source: /note="Description of Artificial Sequence: Synthetic oligonucleotide"
  source: /note="Antisense strand to SEQ ID NO: 3849"
acauucagcaauuauuaga

SEQ ID NO: 3851 - RNA, 19 nt, Artificial Sequence
  source: /note="Description of Artificial Sequence: Synthetic oligonucleotide"
  source: /note="Sense strand starting at position 2041 of SEQ ID NO: 134"
ugcugaauguuugcuauau

SEQ ID NO: 3852 - RNA, 19 nt, Artificial Sequence
  source: /note="Description of Artificial Sequence: Synthetic oligonucleotide"
  source: /note="Antisense strand to SEQ ID NO: 3851"
auauagcaaacauucagca

SEQ ID NO: 3853 - RNA, 19 nt, Artificial Sequence
  source: /note="Description of Artificial Sequence: Synthetic oligonucleotide"
  source: /note="Sense strand starting at position 2041 of SEQ ID NO: 136"
cugaauguuugcuauauaa

SEQ ID NO: 3854 - RNA, 19 nt, Artificial Sequence
  source: /note="Description of Artificial Sequence: Synthetic oligonucleotide"
  source: /note="Antisense strand to SEQ ID NO: 3853"
uuauauagcaaacauucag

SEQ ID NO: 3855 - RNA, 19 nt, Artificial Sequence
  source: /note="Description of Artificial Sequence: Synthetic oligonucleotide"
  source: /note="Sense strand starting at position 2041 of SEQ ID NO: 232"
gcugucagguuauauuauu

SEQ ID NO: 3856 - RNA, 19 nt, Artificial Sequence
  source: /note="Description of Artificial Sequence: Synthetic oligonucleotide"
  source: /note="Antisense strand to SEQ ID NO: 3855"
aauaauauaaccugacagc

SEQ ID NO: 3857 - RNA, 19 nt, Artificial Sequence
  source: /note="Description of Artificial Sequence: Synthetic oligonucleotide"
  source: /note="Sense strand starting at position 2041 of SEQ ID NO: 633"
aucacauauuccuguuuga

SEQ ID NO: 3858 - RNA, 19 nt, Artificial Sequence
  source: /note="Description of Artificial Sequence: Synthetic oligonucleotide"
  source: /note="Antisense strand to SEQ ID NO: 3857"
ucaaacaggaauaugugau

SEQ ID NO: 3859 - RNA, 19 nt, Artificial Sequence
  source: /note="Description of Artificial Sequence: Synthetic oligonucleotide"
  source: /note="Sense strand starting at position 2041 of SEQ ID NO: 680"
ugacuagagucaggagauc

SEQ ID NO: 3860 - RNA, 19 nt, Artificial Sequence
  source: /note="Description of Artificial Sequence: Synthetic oligonucleotide"
  source: /note="Antisense strand to SEQ ID NO: 3859"
gaucuccugacucuaguca

SEQ ID NO: 3861 - RNA, 19 nt, Artificial Sequence
  source: /note="Description of Artificial Sequence: Synthetic oligonucleotide"
  source: /note="Sense strand starting at position 2041 of SEQ ID NO: 722"
ggcccucuguccucagcaa

SEQ ID NO: 3862 - RNA, 19 nt, Artificial Sequence
  source: /note="Description of Artificial Sequence: Synthetic oligonucleotide"
  source: /note="Antisense strand to SEQ ID NO: 3861"
uugcugaggacagagggcc

SEQ ID NO: 3863 - RNA, 19 nt, Artificial Sequence
  source: /note="Description of Artificial Sequence: Synthetic oligonucleotide"
  source: /note="Sense strand starting at position 2041 of SEQ ID NO: 723"
gcccucuguccucagcaau

SEQ ID NO: 3864 - RNA, 19 nt, Artificial Sequence
  source: /note="Description of Artificial Sequence: Synthetic oligonucleotide"
  source: /note="Antisense strand to SEQ ID NO: 3863"
auugcugaggacagagggc

SEQ ID NO: 3865 - RNA, 19 nt, Artificial Sequence
  source: /note="Description of Artificial Sequence: Synthetic oligonucleotide"
  source: /note="Sense strand starting at position 2041 of SEQ ID NO: 726"
cucuguccucagcaauuga

SEQ ID NO: 3866 - RNA, 19 nt, Artificial Sequence
  source: /note="Description of Artificial Sequence: Synthetic oligonucleotide"
  source: /note="Antisense strand to SEQ ID NO: 3865"
ucaauugcugaggacagag

SEQ ID NO: 3867 - RNA, 19 nt, Artificial Sequence
  source: /note="Description of Artificial Sequence: Synthetic oligonucleotide"
  source: /note="Sense strand starting at position 2041 of SEQ ID NO: 733"
cucagcaauugaugacaua

SEQ ID NO: 3868 - RNA, 19 nt, Artificial Sequence
  source: /note="Description of Artificial Sequence: Synthetic oligonucleotide"
  source: /note="Antisense strand to SEQ ID NO: 3867"
uaugucaucaauugcugag

SEQ ID NO: 3869 - RNA, 19 nt, Artificial Sequence
  source: /note="Description of Artificial Sequence: Synthetic oligonucleotide"
  source: /note="Sense strand starting at position 2041 of SEQ ID NO: 745"
ugacauaaauguugauugu

SEQ ID NO: 3870 - RNA, 19 nt, Artificial Sequence
  source: /note="Description of Artificial Sequence: Synthetic oligonucleotide"
  source: /note="Antisense strand to SEQ ID NO: 3869"
acaaucaacauuuauguca

SEQ ID NO: 3871 - RNA, 19 nt, Artificial Sequence
  source: /note="Description of Artificial Sequence: Synthetic oligonucleotide"
  source: /note="Sense strand starting at position 2041 of SEQ ID NO: 754"
uguugauugugucuuugca

SEQ ID NO: 3872 - RNA, 19 nt, Artificial Sequence
  source: /note="Description of Artificial Sequence: Synthetic oligonucleotide"
  source: /note="Antisense strand to SEQ ID NO: 3871"
ugcaaagacacaaucaaca

SEQ ID NO: 3873 - RNA, 19 nt, Artificial Sequence
  source: /note="Description of Artificial Sequence: Synthetic oligonucleotide"
  source: /note="Sense strand starting at position 2041 of SEQ ID NO: 756"
uugauugugucuuugcaau

SEQ ID NO: 3874 - RNA, 19 nt, Artificial Sequence
  source: /note="Description of Artificial Sequence: Synthetic oligonucleotide"
  source: /note="Antisense strand to SEQ ID NO: 3873"
auugcaaagacacaaucaa

SEQ ID NO: 3875 - RNA, 19 nt, Artificial Sequence
  source: /note="Description of Artificial Sequence: Synthetic oligonucleotide"
  source: /note="Sense strand starting at position 2041 of SEQ ID NO: 768"
uugcaaugcacgugguauc

SEQ ID NO: 3876 - RNA, 19 nt, Artificial Sequence
  source: /note="Description of Artificial Sequence: Synthetic oligonucleotide"
  source: /note="Antisense strand to SEQ ID NO: 3875"
gauaccacgugcauugcaa

SEQ ID NO: 3877 - RNA, 19 nt, Artificial Sequence
  source: /note="Description of Artificial Sequence: Synthetic oligonucleotide"
  source: /note="Sense strand starting at position 2041 of SEQ ID NO: 778"
cgugguaucaagggcuuua

SEQ ID NO: 3878 - RNA, 19 nt, Artificial Sequence
  source: /note="Description of Artificial Sequence: Synthetic oligonucleotide"
  source: /note="Antisense strand to SEQ ID NO: 3877"
uaaagcccuugauaccacg

SEQ ID NO: 3879 - RNA, 19 nt, Artificial Sequence
  source: /note="Description of Artificial Sequence: Synthetic oligonucleotide"
  source: /note="Sense strand starting at position 2041 of SEQ ID NO: 869"
gcaagaggcacgugaaugu

SEQ ID NO: 3880 - RNA, 19 nt, Artificial Sequence
  source: /note="Description of Artificial Sequence: Synthetic oligonucleotide"
  source: /note="Antisense strand to SEQ ID NO: 3879"
acauucacgugccucuugc

SEQ ID NO: 3881 - RNA, 19 nt, Artificial Sequence
  source: /note="Description of Artificial Sequence: Synthetic oligonucleotide"
  source: /note="Sense strand starting at position 2041 of SEQ ID NO: 883"
aauguugagccgugugaca

SEQ ID NO: 3882 - RNA, 19 nt, Artificial Sequence
  source: /note="Description of Artificial Sequence: Synthetic oligonucleotide"
  source: /note="Antisense strand to SEQ ID NO: 3881"
ugucacacggcucaacauu

SEQ ID NO: 3883 - RNA, 19 nt, Artificial Sequence
  source: /note="Description of Artificial Sequence: Synthetic oligonucleotide"
  source: /note="Sense strand starting at position 2041 of SEQ ID NO: 885"
uguugagccgugugacaga

SEQ ID NO: 3884 - RNA, 19 nt, Artificial Sequence
  source: /note="Description of Artificial Sequence: Synthetic oligonucleotide"
  source: /note="Antisense strand to SEQ ID NO: 3883"
ucugucacacggcucaaca

SEQ ID NO: 3885 - RNA, 19 nt, Artificial Sequence
  source: /note="Description of Artificial Sequence: Synthetic oligonucleotide"
  source: /note="Sense strand starting at position 2041 of SEQ ID NO: 1097"
uuucuaugcguggaaugua

SEQ ID NO: 3886 - RNA, 19 nt, Artificial Sequence
  source: /note="Description of Artificial Sequence: Synthetic oligonucleotide"
  source: /note="Antisense strand to SEQ ID NO: 3885"
uacauuccacgcauagaaa

SEQ ID NO: 3887 - RNA, 19 nt, Artificial Sequence
  source: /note="Description of Artificial Sequence: Synthetic oligonucleotide"
  source: /note="Sense strand starting at position 2041 of SEQ ID NO: 1106"
guggaauguacacguauac

SEQ ID NO: 3888 - RNA, 19 nt, Artificial Sequence
  source: /note="Description of Artificial Sequence: Synthetic oligonucleotide"
  source: /note="Antisense strand to SEQ ID NO: 3887"
guauacguguacauuccac

SEQ ID NO: 3889 - RNA, 19 nt, Artificial Sequence
  source: /note="Description of Artificial Sequence: Synthetic oligonucleotide"
  source: /note="Sense strand starting at position 2041 of SEQ ID NO: 1115"
acacguauacgcgugugua

SEQ ID NO: 3890 - RNA, 19 nt, Artificial Sequence
  source: /note="Description of Artificial Sequence: Synthetic oligonucleotide"
  source: /note="Antisense strand to SEQ ID NO: 3889"
uacacacgcguauacgugu

SEQ ID NO: 3891 - RNA, 19 nt, Artificial Sequence
  source: /note="Description of Artificial Sequence: Synthetic oligonucleotide"
  source: /note="Sense strand starting at position 2041 of SEQ ID NO: 1118"
cguauacgcguguguacau

SEQ ID NO: 3892 - RNA, 19 nt, Artificial Sequence
  source: /note="Description of Artificial Sequence: Synthetic oligonucleotide"
  source: /note="Antisense strand to SEQ ID NO: 3891"
auguacacacgcguauacg

SEQ ID NO: 3893 - RNA, 19 nt, Artificial Sequence
  source: /note="Description of Artificial Sequence: Synthetic oligonucleotide"
  source: /note="Sense strand starting at position 2041 of SEQ ID NO: 1119"
guauacgcguguguacaua

SEQ ID NO: 3894 - RNA, 19 nt, Artificial Sequence
  source: /note="Description of Artificial Sequence: Synthetic oligonucleotide"
  source: /note="Antisense strand to SEQ ID NO: 3893"
uauguacacacgcguauac

SEQ ID NO: 3895 - RNA, 19 nt, Artificial Sequence
  source: /note="Description of Artificial Sequence: Synthetic oligonucleotide"
  source: /note="Sense strand starting at position 2041 of SEQ ID NO: 1208"
cugagagguucuucccugu

SEQ ID NO: 3896 - RNA, 19 nt, Artificial Sequence
  source: /note="Description of Artificial Sequence: Synthetic oligonucleotide"
  source: /note="Antisense strand to SEQ ID NO: 3895"
acagggaagaaccucucag

SEQ ID NO: 3897 - RNA, 19 nt, Artificial Sequence
  source: /note="Description of Artificial Sequence: Synthetic oligonucleotide"
  source: /note="Sense strand starting at position 2041 of SEQ ID NO: 1212"
gagguucuucccugucaca

SEQ ID NO: 3898 - RNA, 19 nt, Artificial Sequence
  source: /note="Description of Artificial Sequence: Synthetic oligonucleotide"
  source: /note="Antisense strand to SEQ ID NO: 3897"
ugugacagggaagaaccuc

SEQ ID NO: 3899 - RNA, 19 nt, Artificial Sequence
  source: /note="Description of Artificial Sequence: Synthetic oligonucleotide"
  source: /note="Sense strand starting at position 2041 of SEQ ID NO: 1238"
gugcguuguuuccuugaac

SEQ ID NO: 3900 - RNA, 19 nt, Artificial Sequence
  source: /note="Description of Artificial Sequence: Synthetic oligonucleotide"
  source: /note="Antisense strand to SEQ ID NO: 3899"
guucaaggaaacaacgcac

SEQ ID NO: 3901 - RNA, 19 nt, Artificial Sequence
  source: /note="Description of Artificial Sequence: Synthetic oligonucleotide"
  source: /note="Sense strand starting at position 2041 of SEQ ID NO: 1239"
ugcguuguuuccuugaaca

SEQ ID NO: 3902 - RNA, 19 nt, Artificial Sequence
  source: /note="Description of Artificial Sequence: Synthetic oligonucleotide"
  source: /note="Antisense strand to SEQ ID NO: 3901"
uguucaaggaaacaacgca

SEQ ID NO: 3903 - RNA, 19 nt, Artificial Sequence
  source: /note="Description of Artificial Sequence: Synthetic oligonucleotide"
  source: /note="Sense strand starting at position 2041 of SEQ ID NO: 1241"
cguuguuuccuugaacaau

SEQ ID NO: 3904 - RNA, 19 nt, Artificial Sequence
  source: /note="Description of Artificial Sequence: Synthetic oligonucleotide"
  source: /note="Antisense strand to SEQ ID NO: 3903"
auuguucaaggaaacaacg

SEQ ID NO: 3905 - RNA, 19 nt, Artificial Sequence
  source: /note="Description of Artificial Sequence: Synthetic oligonucleotide"
  source: /note="Sense strand starting at position 2041 of SEQ ID NO: 1260"
gggauagcauuccacugua

SEQ ID NO: 3906 - RNA, 19 nt, Artificial Sequence
  source: /note="Description of Artificial Sequence: Synthetic oligonucleotide"
  source: /note="Antisense strand to SEQ ID NO: 3905"
uacaguggaaugcuauccc

SEQ ID NO: 3907 - RNA, 19 nt, Artificial Sequence
  source: /note="Description of Artificial Sequence: Synthetic oligonucleotide"
  source: /note="Sense strand starting at position 2041 of SEQ ID NO: 1278"
aaagacgucucacgcuuua

SEQ ID NO: 3908 - RNA, 19 nt, Artificial Sequence
  source: /note="Description of Artificial Sequence: Synthetic oligonucleotide"
  source: /note="Antisense strand to SEQ ID NO: 3907"
uaaagcgugagacgucuuu

SEQ ID NO: 3909 - RNA, 19 nt, Artificial Sequence
  source: /note="Description of Artificial Sequence: Synthetic oligonucleotide"
  source: /note="Sense strand starting at position 2041 of SEQ ID NO: 1322"
gacauuggguugcuuccaa

SEQ ID NO: 3910 - RNA, 19 nt, Artificial Sequence
  source: /note="Description of Artificial Sequence: Synthetic oligonucleotide"
  source: /note="Antisense strand to SEQ ID NO: 3909"
uuggaagcaacccaauguc

SEQ ID NO: 3911 - RNA, 19 nt, Artificial Sequence
  source: /note="Description of Artificial Sequence: Synthetic oligonucleotide"
  source: /note="Sense strand starting at position 2041 of SEQ ID NO: 1427"
cgcacaagauauucucauu

SEQ ID NO: 3912 - RNA, 19 nt, Artificial Sequence
  source: /note="Description of Artificial Sequence: Synthetic oligonucleotide"
  source: /note="Antisense strand to SEQ ID NO: 3911"
aaugagaauaucuugugcg

SEQ ID NO: 3913 - RNA, 19 nt, Artificial Sequence
  source: /note="Description of Artificial Sequence: Synthetic oligonucleotide"
  source: /note="Sense strand starting at position 2041 of SEQ ID NO: 1850"
gagcuuugggcccguaaga

SEQ ID NO: 3914 - RNA, 19 nt, Artificial Sequence
  source: /note="Description of Artificial Sequence: Synthetic oligonucleotide"
  source: /note="Antisense strand to SEQ ID NO: 3913"
ucuuacgggcccaaagcuc

SEQ ID NO: 3915 - RNA, 19 nt, Artificial Sequence
  source: /note="Description of Artificial Sequence: Synthetic oligonucleotide"
  source: /note="Sense strand starting at position 2041 of SEQ ID NO: 2120"
ccgguuaucuuauugauuc

SEQ ID NO: 3916 - RNA, 19 nt, Artificial Sequence
  source: /note="Description of Artificial Sequence: Synthetic oligonucleotide"
  source: /note="Antisense strand to SEQ ID NO: 3915"
gaaucaauaagauaaccgg

SEQ ID NO: 3917 - RNA, 19 nt, Artificial Sequence
  source: /note="Description of Artificial Sequence: Synthetic oligonucleotide"
  source: /note="Sense strand starting at position 2041 of SEQ ID NO: 2121"
cgguuaucuuauugauucu

SEQ ID NO: 3918 - RNA, 19 nt, Artificial Sequence
  source: /note="Description of Artificial Sequence: Synthetic oligonucleotide"
  source: /note="Antisense strand to SEQ ID NO: 3917"
agaaucaauaagauaaccg

SEQ ID NO: 3919 - RNA, 19 nt, Artificial Sequence
  source: /note="Description of Artificial Sequence: Synthetic oligonucleotide"
  source: /note="Sense strand starting at position 2041 of SEQ ID NO: 2397"
ccaaacuauggguguguca

SEQ ID NO: 3920 - RNA, 19 nt, Artificial Sequence
  source: /note="Description of Artificial Sequence: Synthetic oligonucleotide"
  source: /note="Antisense strand to SEQ ID NO: 3919"
ugacacacccauaguuugg

SEQ ID NO: 3921 - RNA, 19 nt, Artificial Sequence
  source: /note="Description of Artificial Sequence: Synthetic oligonucleotide"
  source: /note="Sense strand starting at position 2041 of SEQ ID NO: 2467"
gguggagaacuguguuuag

SEQ ID NO: 3922 - RNA, 19 nt, Artificial Sequence
  source: /note="Description of Artificial Sequence: Synthetic oligonucleotide"
  source: /note="Antisense strand to SEQ ID NO: 3921"
cuaaacacaguucuccacc

SEQ ID NO: 3923 - RNA, 19 nt, Artificial Sequence
  source: /note="Description of Artificial Sequence: Synthetic oligonucleotide"
  source: /note="Sense strand starting at position 2041 of SEQ ID NO: 2470"
ggagaacuguguuuaguga

SEQ ID NO: 3924 - RNA, 19 nt, Artificial Sequence
  source: /note="Description of Artificial Sequence: Synthetic oligonucleotide"
  source: /note="Antisense strand to SEQ ID NO: 3923"
ucacuaaacacaguucucc

SEQ ID NO: 3925 - RNA, 19 nt, Artificial Sequence
  source: /note="Description of Artificial Sequence: Synthetic oligonucleotide"
  source: /note="Sense strand starting at position 2041 of SEQ ID NO: 2477"
uguguuuagugagugccua

SEQ ID NO: 3926 - RNA, 19 nt, Artificial Sequence
  source: /note="Description of Artificial Sequence: Synthetic oligonucleotide"
  source: /note="Antisense strand to SEQ ID NO: 3925"
uaggcacucacuaaacaca

SEQ ID NO: 3927 - RNA, 19 nt, Artificial Sequence
  source: /note="Description of Artificial Sequence: Synthetic oligonucleotide"
  source: /note="Sense strand starting at position 2041 of SEQ ID NO: 2512"
gcauacaggcguuaccaua

SEQ ID NO: 3928 - RNA, 19 nt, Artificial Sequence
  source: /note="Description of Artificial Sequence: Synthetic oligonucleotide"
  source: /note="Antisense strand to SEQ ID NO: 3927"
uaugguaacgccuguaugc

SEQ ID NO: 3929 - RNA, 19 nt, Artificial Sequence
  source: /note="Description of Artificial Sequence: Synthetic oligonucleotide"
  source: /note="Sense strand starting at position 2041 of SEQ ID NO: 2536"
auuaaaccuugagaugaag

SEQ ID NO: 3930 - RNA, 19 nt, Artificial Sequence
  source: /note="Description of Artificial Sequence: Synthetic oligonucleotide"
  source: /note="Antisense strand to SEQ ID NO: 3929"
cuucaucucaagguuuaau

SEQ ID NO: 3931 - RNA, 19 nt, Artificial Sequence
  source: /note="Description of Artificial Sequence: Synthetic oligonucleotide"
  source: /note="Sense strand starting at position 2041 of SEQ ID NO: 2587"
gagucucacugcuaguaca

SEQ ID NO: 3932 - RNA, 19 nt, Artificial Sequence
  source: /note="Description of Artificial Sequence: Synthetic oligonucleotide"
  source: /note="Antisense strand to SEQ ID NO: 3931"
uguacuagcagugagacuc

SEQ ID NO: 3933 - RNA, 19 nt, Artificial Sequence
  source: /note="Description of Artificial Sequence: Synthetic oligonucleotide"
  source: /note="Sense strand starting at position 2041 of SEQ ID NO: 2598"
cuaguacauagagguguua

SEQ ID NO: 3934 - RNA, 19 nt, Artificial Sequence
  source: /note="Description of Artificial Sequence: Synthetic oligonucleotide"
  source: /note="Antisense strand to SEQ ID NO: 3933"
uaacaccucuauguacuag

SEQ ID NO: 3935 - RNA, 19 nt, Artificial Sequence
  source: /note="Description of Artificial Sequence: Synthetic oligonucleotide"
  source: /note="Sense strand starting at position 2041 of SEQ ID NO: 2600"
aguacauagagguguuauc

SEQ ID NO: 3936 - RNA, 19 nt, Artificial Sequence
  source: /note="Description of Artificial Sequence: Synthetic oligonucleotide"
  source: /note="Antisense strand to SEQ ID NO: 3935"
gauaacaccucuauguacu

SEQ ID NO: 3937 - RNA, 19 nt, Artificial Sequence
  source: /note="Description of Artificial Sequence: Synthetic oligonucleotide"
  source: /note="Sense strand starting at position 2041 of SEQ ID NO: 2712"
cccgaaacuuguggacuaa

SEQ ID NO: 3938 - RNA, 19 nt, Artificial Sequence
  source: /note="Description of Artificial Sequence: Synthetic oligonucleotide"
  source: /note="Antisense strand to SEQ ID NO: 3937"
uuaguccacaaguuucggg

SEQ ID NO: 3939 - RNA, 19 nt, Artificial Sequence
  source: /note="Description of Artificial Sequence: Synthetic oligonucleotide"
  source: /note="Sense strand starting at position 2041 of SEQ ID NO: 2744"
ccuuaaucagaucgucauu

SEQ ID NO: 3940 - RNA, 19 nt, Artificial Sequence
  source: /note="Description of Artificial Sequence: Synthetic oligonucleotide"
  source: /note="Antisense strand to SEQ ID NO: 3939"
aaugacgaucugauuaagg

SEQ ID NO: 3941 - RNA, 19 nt, Artificial Sequence
  source: /note="Description of Artificial Sequence: Synthetic oligonucleotide"
  source: /note="Sense strand starting at position 2041 of SEQ ID NO: 2773"
auuacaaacuggugaguga

SEQ ID NO: 3942 - RNA, 19 nt, Artificial Sequence
  source: /note="Description of Artificial Sequence: Synthetic oligonucleotide"
  source: /note="Antisense strand to SEQ ID NO: 3941"
ucacucaccaguuuguaau

SEQ ID NO: 3943 - RNA, 19 nt, Artificial Sequence
  source: /note="Description of Artificial Sequence: Synthetic oligonucleotide"
  source: /note="Sense strand starting at position 2041 of SEQ ID NO: 3287"
gggcauggguugcauuaaa

SEQ ID NO: 3944 - RNA, 19 nt, Artificial Sequence
  source: /note="Description of Artificial Sequence: Synthetic oligonucleotide"
  source: /note="Antisense strand to SEQ ID NO: 3943"
uuuaaugcaacccaugccc

SEQ ID NO: 3945 - RNA, 19 nt, Artificial Sequence
  source: /note="Description of Artificial Sequence: Synthetic oligonucleotide"
  source: /note="Sense strand starting at position 2041 of SEQ ID NO: 3683"
uuaauauucuuggucgggu

SEQ ID NO: 3946 - RNA, 19 nt, Artificial Sequence
  source: /note="Description of Artificial Sequence: Synthetic oligonucleotide"
  source: /note="Antisense strand to SEQ ID NO: 3945"
acccgaccaagaauauuaa

SEQ ID NO: 3947 - RNA, 19 nt, Artificial Sequence
  source: /note="Description of Artificial Sequence: Synthetic oligonucleotide"
  source: /note="Sense strand starting at position 2041 of SEQ ID NO: 3686"
auauucuuggucgggugua

SEQ ID NO: 3948 - RNA, 19 nt, Artificial Sequence
  source: /note="Description of Artificial Sequence: Synthetic oligonucleotide"
  source: /note="Antisense strand to SEQ ID NO: 3947"
uacacccgaccaagaauau

SEQ ID NO: 3949 - RNA, 19 nt, Artificial Sequence
  source: /note="Description of Artificial Sequence: Synthetic oligonucleotide"
  source: /note="Sense strand starting at position 2040 of SEQ ID NO: 25"
uggucuugucuuugggacu

SEQ ID NO: 3950 - RNA, 19 nt, Artificial Sequence
  source: /note="Description of Artificial Sequence: Synthetic oligonucleotide"
  source: /note="Antisense strand to SEQ ID NO: 3949"
agucccaaagacaagacca

SEQ ID NO: 3951 - RNA, 19 nt, Artificial Sequence
  source: /note="Description of Artificial Sequence: Synthetic oligonucleotide"
  source: /note="Sense strand starting at position 2040 of SEQ ID NO: 188"
ugcuaucucugguguguuu

SEQ ID NO: 3952 - RNA, 19 nt, Artificial Sequence
  source: /note="Description of Artificial Sequence: Synthetic oligonucleotide"
  source: /note="Antisense strand to SEQ ID NO: 3951"
aaacacaccagagauagca

SEQ ID NO: 3953 - RNA, 19 nt, Artificial Sequence
  source: /note="Description of Artificial Sequence: Synthetic oligonucleotide"
  source: /note="Sense strand starting at position 2040 of SEQ ID NO: 718"
acggacauguugcugauau

SEQ ID NO: 3954 - RNA, 19 nt, Artificial Sequence
  source: /note="Description of Artificial Sequence: Synthetic oligonucleotide"
  source: /note="Antisense strand to SEQ ID NO: 3953"
auaucagcaacauguccgu

SEQ ID NO: 3955 - RNA, 19 nt, Artificial Sequence
  source: /note="Description of Artificial Sequence: Synthetic oligonucleotide"
  source: /note="Sense strand starting at position 2040 of SEQ ID NO: 719"
cggacauguugcugauaug

SEQ ID NO: 3956 - RNA, 19 nt, Artificial Sequence
  source: /note="Description of Artificial Sequence: Synthetic oligonucleotide"
  source: /note="Antisense strand to SEQ ID NO: 3955"
cauaucagcaacauguccg

SEQ ID NO: 3957 - RNA, 19 nt, Artificial Sequence
  source: /note="Description of Artificial Sequence: Synthetic oligonucleotide"
  source: /note="Sense strand starting at position 2040 of SEQ ID NO: 722"
acauguugcugauaugaau

SEQ ID NO: 3958 - RNA, 19 nt, Artificial Sequence
  source: /note="Description of Artificial Sequence: Synthetic oligonucleotide"
  source: /note="Antisense strand to SEQ ID NO: 3957"
auucauaucagcaacaugu

SEQ ID NO: 3959 - RNA, 19 nt, Artificial Sequence
  source: /note="Description of Artificial Sequence: Synthetic oligonucleotide"
  source: /note="Sense strand starting at position 2040 of SEQ ID NO: 736"
ugaaucucacuuggugagu

SEQ ID NO: 3960 - RNA, 19 nt, Artificial Sequence
  source: /note="Description of Artificial Sequence: Synthetic oligonucleotide"
  source: /note="Antisense strand to SEQ ID NO: 3959"
acucaccaagugagauuca

SEQ ID NO: 3961 - RNA, 19 nt, Artificial Sequence
  source: /note="Description of Artificial Sequence: Synthetic oligonucleotide"
  source: /note="Sense strand starting at position 2040 of SEQ ID NO: 759"
acaacagaguccugcauuu

SEQ ID NO: 3962 - RNA, 19 nt, Artificial Sequence
  source: /note="Description of Artificial Sequence: Synthetic oligonucleotide"
  source: /note="Antisense strand to SEQ ID NO: 3961"
aaaugcaggacucuguugu

SEQ ID NO: 3963 - RNA, 19 nt, Artificial Sequence
  source: /note="Description of Artificial Sequence: Synthetic oligonucleotide"
  source: /note="Sense strand starting at position 2040 of SEQ ID NO: 937"
aaacgcaugugcucuauga

SEQ ID NO: 3964 - RNA, 19 nt, Artificial Sequence
  source: /note="Description of Artificial Sequence: Synthetic oligonucleotide"
  source: /note="Antisense strand to SEQ ID NO: 3963"
ucauagagcacaugcguuu

SEQ ID NO: 3965 - RNA, 19 nt, Artificial Sequence
  source: /note="Description of Artificial Sequence: Synthetic oligonucleotide"
  source: /note="Sense strand starting at position 2040 of SEQ ID NO: 1039"
acgggcaacuccuaagaca

SEQ ID NO: 3966 - RNA, 19 nt, Artificial Sequence
  source: /note="Description of Artificial Sequence: Synthetic oligonucleotide"
  source: /note="Antisense strand to SEQ ID NO: 3965"
ugucuuaggaguugcccgu

SEQ ID NO: 3967 - RNA, 19 nt, Artificial Sequence
  source: /note="Description of Artificial Sequence: Synthetic oligonucleotide"
  source: /note="Sense strand starting at position 2040 of SEQ ID NO: 1225"
cugaguuggcuucguaguu

SEQ ID NO: 3968 - RNA, 19 nt, Artificial Sequence
  source: /note="Description of Artificial Sequence: Synthetic oligonucleotide"
  source: /note="Antisense strand to SEQ ID NO: 3967"
aacuacgaagccaacucag

SEQ ID NO: 3969 - RNA, 19 nt, Artificial Sequence
  source: /note="Description of Artificial Sequence: Synthetic oligonucleotide"
  source: /note="Sense strand starting at position 2040 of SEQ ID NO: 1226"
ugaguuggcuucguaguua

SEQ ID NO: 3970 - RNA, 19 nt, Artificial Sequence
  source: /note="Description of Artificial Sequence: Synthetic oligonucleotide"
  source: /note="Antisense strand to SEQ ID NO: 3969"
uaacuacgaagccaacuca

SEQ ID NO: 3971 - RNA, 19 nt, Artificial Sequence
  source: /note="Description of Artificial Sequence: Synthetic oligonucleotide"
  source: /note="Sense strand starting at position 2040 of SEQ ID NO: 1230"
uuggcuucguaguuagcaa

SEQ ID NO: 3972 - RNA, 19 nt, Artificial Sequence
  source: /note="Description of Artificial Sequence: Synthetic oligonucleotide"
  source: /note="Antisense strand to SEQ ID NO: 3971"
uugcuaacuacgaagccaa

SEQ ID NO: 3973 - RNA, 19 nt, Artificial Sequence
  source: /note="Description of Artificial Sequence: Synthetic oligonucleotide"
  source: /note="Sense strand starting at position 2040 of SEQ ID NO: 1231"
uggcuucguaguuagcaaa

SEQ ID NO: 3974 - RNA, 19 nt, Artificial Sequence
  source: /note="Description of Artificial Sequence: Synthetic oligonucleotide"
  source: /note="Antisense strand to SEQ ID NO: 3973"
uuugcuaacuacgaagcca

SEQ ID NO: 3975 - RNA, 19 nt, Artificial Sequence
  source: /note="Description of Artificial Sequence: Synthetic oligonucleotide"
  source: /note="Sense strand starting at position 2040 of SEQ ID NO: 1313"
caccgagaaaugcgguuau

SEQ ID NO: 3976 - RNA, 19 nt, Artificial Sequence
  source: /note="Description of Artificial Sequence: Synthetic oligonucleotide"
  source: /note="Antisense strand to SEQ ID NO: 3975"
auaaccgcauuucucggug

SEQ ID NO: 3977 - RNA, 19 nt, Artificial Sequence
  source: /note="Description of Artificial Sequence: Synthetic oligonucleotide"
  source: /note="Sense strand starting at position 2040 of SEQ ID NO: 1317"
gagaaaugcgguuaugucu

SEQ ID NO: 3978 - RNA, 19 nt, Artificial Sequence
  source: /note="Description of Artificial Sequence: Synthetic oligonucleotide"
  source: /note="Antisense strand to SEQ ID NO: 3977"
agacauaaccgcauuucuc

SEQ ID NO: 3979 - RNA, 19 nt, Artificial Sequence
  source: /note="Description of Artificial Sequence: Synthetic oligonucleotide"
  source: /note="Sense strand starting at position 2040 of SEQ ID NO: 1324"
gcgguuaugucuccaacca

SEQ ID NO: 3980 - RNA, 19 nt, Artificial Sequence
  source: /note="Description of Artificial Sequence: Synthetic oligonucleotide"
  source: /note="Antisense strand to SEQ ID NO: 3979"
ugguuggagacauaaccgc

SEQ ID NO: 3981 - RNA, 19 nt, Artificial Sequence
  source: /note="Description of Artificial Sequence: Synthetic oligonucleotide"
  source: /note="Sense strand starting at position 2040 of SEQ ID NO: 1325"
cgguuaugucuccaaccac

SEQ ID NO: 3982 - RNA, 19 nt, Artificial Sequence
  source: /note="Description of Artificial Sequence: Synthetic oligonucleotide"
  source: /note="Antisense strand to SEQ ID NO: 3981"
gugguuggagacauaaccg

SEQ ID NO: 3983 - RNA, 19 nt, Artificial Sequence
  source: /note="Description of Artificial Sequence: Synthetic oligonucleotide"
  source: /note="Sense strand starting at position 2040 of SEQ ID NO: 1368"
ugccgucucucugaaccua

SEQ ID NO: 3984 - RNA, 19 nt, Artificial Sequence
  source: /note="Description of Artificial Sequence: Synthetic oligonucleotide"
  source: /note="Antisense strand to SEQ ID NO: 3983"
uagguucagagagacggca

SEQ ID NO: 3985 - RNA, 19 nt, Artificial Sequence
  source: /note="Description of Artificial Sequence: Synthetic oligonucleotide"
  source: /note="Sense strand starting at position 2040 of SEQ ID NO: 1583"
gaaugccugugaucacugu

SEQ ID NO: 3986 - RNA, 19 nt, Artificial Sequence
  source: /note="Description of Artificial Sequence: Synthetic oligonucleotide"
  source: /note="Antisense strand to SEQ ID NO: 3985"
acagugaucacaggcauuc

SEQ ID NO: 3987 - RNA, 19 nt, Artificial Sequence
  source: /note="Description of Artificial Sequence: Synthetic oligonucleotide"
  source: /note="Sense strand starting at position 2040 of SEQ ID NO: 1587"
gccugugaucacugugccu

SEQ ID NO: 3988 - RNA, 19 nt, Artificial Sequence
  source: /note="Description of Artificial Sequence: Synthetic oligonucleotide"
  source: /note="Antisense strand to SEQ ID NO: 3987"
aggcacagugaucacaggc

SEQ ID NO: 3989 - RNA, 19 nt, Artificial Sequence
  source: /note="Description of Artificial Sequence: Synthetic oligonucleotide"
  source: /note="Sense strand starting at position 2040 of SEQ ID NO: 1684"
cccaaaguugagugccaaa

SEQ ID NO: 3990 - RNA, 19 nt, Artificial Sequence
  source: /note="Description of Artificial Sequence: Synthetic oligonucleotide"
  source: /note="Antisense strand to SEQ ID NO: 3989"
uuuggcacucaacuuuggg

SEQ ID NO: 3991 - RNA, 19 nt, Artificial Sequence
  source: /note="Description of Artificial Sequence: Synthetic oligonucleotide"
  source: /note="Sense strand starting at position 2040 of SEQ ID NO: 1687"
aaaguugagugccaaagau

SEQ ID NO: 3992 - RNA, 19 nt, Artificial Sequence
  source: /note="Description of Artificial Sequence: Synthetic oligonucleotide"
  source: /note="Antisense strand to SEQ ID NO: 3991"
aucuuuggcacucaacuuu

SEQ ID NO: 3993 - RNA, 19 nt, Artificial Sequence
  source: /note="Description of Artificial Sequence: Synthetic oligonucleotide"
  source: /note="Sense strand starting at position 2040 of SEQ ID NO: 2189"
gcccuaacucaccgauguu

SEQ ID NO: 3994 - RNA, 19 nt, Artificial Sequence
  source: /note="Description of Artificial Sequence: Synthetic oligonucleotide"
  source: /note="Antisense strand to SEQ ID NO: 3993"
aacaucggugaguuagggc

SEQ ID NO: 3995 - RNA, 19 nt, Artificial Sequence
  source: /note="Description of Artificial Sequence: Synthetic oligonucleotide"
  source: /note="Sense strand starting at position 2040 of SEQ ID NO: 3029"
uuagaaaguccugguuccu

SEQ ID NO: 3996 - RNA, 19 nt, Artificial Sequence
  source: /note="Description of Artificial Sequence: Synthetic oligonucleotide"
  source: /note="Antisense strand to SEQ ID NO: 3995"
aggaaccaggacuuucuaa

SEQ ID NO: 3997 - RNA, 19 nt, Artificial Sequence
  source: /note="Description of Artificial Sequence: Synthetic oligonucleotide"
  source: /note="Sense strand starting at position 2040 of SEQ ID NO: 3207"
uugccuucugugcagacau

SEQ ID NO: 3998 - RNA, 19 nt, Artificial Sequence
  source: /note="Description of Artificial Sequence: Synthetic oligonucleotide"
  source: /note="Antisense strand to SEQ ID NO: 3997"
augucugcacagaaggcaa

SEQ ID NO: 3999 - RNA, 19 nt, Artificial Sequence
  source: /note="Description of Artificial Sequence: Synthetic oligonucleotide"
  source: /note="Sense strand starting at position 2040 of SEQ ID NO: 3252"
gaaguaaagucuugaugua

SEQ ID NO: 4000 - RNA, 19 nt, Artificial Sequence
  source: /note="Description of Artificial Sequence: Synthetic oligonucleotide"
  source: /note="Antisense strand to SEQ ID NO: 3999"
uacaucaagacuuuacuuc

SEQ ID NO: 4001 - RNA, 19 nt, Artificial Sequence
  source: /note="Description of Artificial Sequence: Synthetic oligonucleotide"
  source: /note="Sense strand starting at position 2040 of SEQ ID NO: 3369"
cggugacaccugugagcaa

SEQ ID NO: 4002 - RNA, 19 nt, Artificial Sequence
  source: /note="Description of Artificial Sequence: Synthetic oligonucleotide"
  source: /note="Antisense strand to SEQ ID NO: 4001"
uugcucacaggugucaccg

SEQ ID NO: 4003 - RNA, 19 nt, Artificial Sequence
  source: /note="Description of Artificial Sequence: Synthetic oligonucleotide"
  source: /note="Sense strand starting at position 2040 of SEQ ID NO: 3382"
gagcaagagugggcgaauu

SEQ ID NO: 4004 - RNA, 19 nt, Artificial Sequence
  source: /note="Description of Artificial Sequence: Synthetic oligonucleotide"
  source: /note="Antisense strand to SEQ ID NO: 4003"
aauucgcccacucuugcuc

SEQ ID NO: 4005 - RNA, 19 nt, Artificial Sequence
  source: /note="Description of Artificial Sequence: Synthetic oligonucleotide"
  source: /note="Sense strand starting at position 2040 of SEQ ID NO: 3411"
ccaauuaaugagugagugu

SEQ ID NO: 4006 - RNA, 19 nt, Artificial Sequence
  source: /note="Description of Artificial Sequence: Synthetic oligonucleotide"
  source: /note="Antisense strand to SEQ ID NO: 4005"
acacucacucauuaauugg

SEQ ID NO: 4007 - RNA, 19 nt, Artificial Sequence
  source: /note="Description of Artificial Sequence: Synthetic oligonucleotide"
  source: /note="Sense strand starting at position 2040 of SEQ ID NO: 3537"
aggguaaauuacugaguaa

SEQ ID NO: 4008 - RNA, 19 nt, Artificial Sequence
  source: /note="Description of Artificial Sequence: Synthetic oligonucleotide"
  source: /note="Antisense strand to SEQ ID NO: 4007"
uuacucaguaauuuacccu

SEQ ID NO: 4009 - RNA, 19 nt, Artificial Sequence
  source: /note="Description of Artificial Sequence: Synthetic oligonucleotide"
  source: /note="Sense strand starting at position 2040 of SEQ ID NO: 3560"
gcaaaugggugggugaauu

SEQ ID NO: 4010 - RNA, 19 nt, Artificial Sequence
  source: /note="Description of Artificial Sequence: Synthetic oligonucleotide"
  source: /note="Antisense strand to SEQ ID NO: 4009"
aauucacccacccauuugc

SEQ ID NO: 4011 - RNA, 19 nt, Artificial Sequence
  source: /note="Description of Artificial Sequence: Synthetic oligonucleotide"
  source: /note="Sense strand starting at position 2040 of SEQ ID NO: 3619"
agugaauguguggguggau

SEQ ID NO: 4012 - RNA, 19 nt, Artificial Sequence
  source: /note="Description of Artificial Sequence: Synthetic oligonucleotide"
  source: /note="Antisense strand to SEQ ID NO: 4011"
auccacccacacauucacu

SEQ ID NO: 4013 - RNA, 19 nt, Artificial Sequence
  source: /note="Description of Artificial Sequence: Synthetic oligonucleotide"
  source: /note="Sense strand starting at position 2040 of SEQ ID NO: 3620"
gugaauguguggguggauu

SEQ ID NO: 4014 - RNA, 19 nt, Artificial Sequence
  source: /note="Description of Artificial Sequence: Synthetic oligonucleotide"
  source: /note="Antisense strand to SEQ ID NO: 4013"
aauccacccacacauucac

SEQ ID NO: 4015 - RNA, 19 nt, Artificial Sequence
  source: /note="Description of Artificial Sequence: Synthetic oligonucleotide"
  source: /note="Sense strand starting at position 2040 of SEQ ID NO: 3663"
gggcauguguguucgagug

SEQ ID NO: 4016 - RNA, 19 nt, Artificial Sequence
  source: /note="Description of Artificial Sequence: Synthetic oligonucleotide"
  source: /note="Antisense strand to SEQ ID NO: 4015"
cacucgaacacacaugccc

SEQ ID NO: 4017 - RNA, 19 nt, Artificial Sequence
  source: /note="Description of Artificial Sequence: Synthetic oligonucleotide"
  source: /note="Sense strand starting at position 2040 of SEQ ID NO: 3665"
gcauguguguucgaguggu

SEQ ID NO: 4018 - RNA, 19 nt, Artificial Sequence
  source: /note="Description of Artificial Sequence: Synthetic oligonucleotide"
  source: /note="Antisense strand to SEQ ID NO: 4017"
accacucgaacacacaugc

SEQ ID NO: 4019 - RNA, 19 nt, Artificial Sequence
  source: /note="Description of Artificial Sequence: Synthetic oligonucleotide"
  source: /note="Sense strand starting at position 2040 of SEQ ID NO: 3668"
uguguguucgagugguaug

SEQ ID NO: 4020 - RNA, 19 nt, Artificial Sequence
  source: /note="Description of Artificial Sequence: Synthetic oligonucleotide"
  source: /note="Antisense strand to SEQ ID NO: 4019"
cauaccacucgaacacaca

SEQ ID NO: 4021 - RNA, 19 nt, Artificial Sequence
  source: /note="Description of Artificial Sequence: Synthetic oligonucleotide"
  source: /note="Sense strand starting at position 2040 of SEQ ID NO: 3669"
guguguucgagugguauga

SEQ ID NO: 4022 - RNA, 19 nt, Artificial Sequence
  source: /note="Description of Artificial Sequence: Synthetic oligonucleotide"
  source: /note="Antisense strand to SEQ ID NO: 4021"
ucauaccacucgaacacac

SEQ ID NO: 4023 - RNA, 19 nt, Artificial Sequence
  source: /note="Description of Artificial Sequence: Synthetic oligonucleotide"
  source: /note="Sense strand starting at position 2040 of SEQ ID NO: 3701"
uguucuuuccacugcuaga

SEQ ID NO: 4024 - RNA, 19 nt, Artificial Sequence
  source: /note="Description of Artificial Sequence: Synthetic oligonucleotide"
  source: /note="Antisense strand to SEQ ID NO: 4023"
ucuagcaguggaaagaaca

SEQ ID NO: 4025 - RNA, 19 nt, Artificial Sequence
  source: /note="Description of Artificial Sequence: Synthetic oligonucleotide"
  source: /note="Sense strand starting at position 2040 of SEQ ID NO: 3742"
gcuuuauucuguccacuug

SEQ ID NO: 4026 - RNA, 19 nt, Artificial Sequence
  source: /note="Description of Artificial Sequence: Synthetic oligonucleotide"
  source: /note="Antisense strand to SEQ ID NO: 4025"
caaguggacagaauaaagc

SEQ ID NO: 4027 - RNA, 19 nt, Artificial Sequence
  source: /note="Description of Artificial Sequence: Synthetic oligonucleotide"
  source: /note="Sense strand starting at position 2040 of SEQ ID NO: 3759"
ugaucugaccucugaagcu

SEQ ID NO: 4028 - RNA, 19 nt, Artificial Sequence
  source: /note="Description of Artificial Sequence: Synthetic oligonucleotide"
  source: /note="Antisense strand to SEQ ID NO: 4027"
agcuucagaggucagauca

SEQ ID NO: 4029 - RNA, 19 nt, Artificial Sequence
  source: /note="Description of Artificial Sequence: Synthetic oligonucleotide"
  source: /note="Sense strand starting at position 2040 of SEQ ID NO: 3793"
ugcuauugccuguagggaa

SEQ ID NO: 4030 - RNA, 19 nt, Artificial Sequence
  source: /note="Description of Artificial Sequence: Synthetic oligonucleotide"
  source: /note="Antisense strand to SEQ ID NO: 4029"
uucccuacaggcaauagca

SEQ ID NO: 4031 - RNA, 19 nt, Artificial Sequence
  source: /note="Description of Artificial Sequence: Synthetic oligonucleotide"
  source: /note="Sense strand starting at position 2040 of SEQ ID NO: 3880"
ggaacuagcucagucacua

SEQ ID NO: 4032 - RNA, 19 nt, Artificial Sequence
  source: /note="Description of Artificial Sequence: Synthetic oligonucleotide"
  source: /note="Antisense strand to SEQ ID NO: 4031"
uagugacugagcuaguucc

SEQ ID NO: 4033 - RNA, 19 nt, Artificial Sequence
  source: /note="Description of Artificial Sequence: Synthetic oligonucleotide"
  source: /note="Sense strand starting at position 2040 of SEQ ID NO: 3888"
cucagucacuauuccgaua

SEQ ID NO: 4034 - RNA, 19 nt, Artificial Sequence
  source: /note="Description of Artificial Sequence: Synthetic oligonucleotide"
  source: /note="Antisense strand to SEQ ID NO: 4033"
uaucggaauagugacugag

SEQ ID NO: 4035 - RNA, 19 nt, Artificial Sequence
  source: /note="Description of Artificial Sequence: Synthetic oligonucleotide"
  source: /note="Sense strand starting at position 2040 of SEQ ID NO: 3891"
agucacuauuccgauaacu

SEQ ID NO: 4036 - RNA, 19 nt, Artificial Sequence
  source: /note="Description of Artificial Sequence: Synthetic oligonucleotide"
  source: /note="Antisense strand to SEQ ID NO: 4035"
aguuaucggaauagugacu

SEQ ID NO: 4037 - RNA, 19 nt, Artificial Sequence
  source: /note="Description of Artificial Sequence: Synthetic oligonucleotide"
  source: /note="Sense strand starting at position 2040 of SEQ ID NO: 3960"
gaaagaugauccuggcuca

SEQ ID NO: 4038 - RNA, 19 nt, Artificial Sequence
  source: /note="Description of Artificial Sequence: Synthetic oligonucleotide"
  source: /note="Antisense strand to SEQ ID NO: 4037"
ugagccaggaucaucuuuc

SEQ ID NO: 4039 - RNA, 19 nt, Artificial Sequence
  source: /note="Description of Artificial Sequence: Synthetic oligonucleotide"
  source: /note="Sense strand starting at position 2040 of SEQ ID NO: 3963"
agaugauccuggcucaguu

SEQ ID NO: 4040 - RNA, 19 nt, Artificial Sequence
  source: /note="Description of Artificial Sequence: Synthetic oligonucleotide"
  source: /note="Antisense strand to SEQ ID NO: 4039"
aacugagccaggaucaucu

SEQ ID NO: 4041 - RNA, 19 nt, Artificial Sequence
  source: /note="Description of Artificial Sequence: Synthetic oligonucleotide"
  source: /note="Sense strand starting at position 2042 of SEQ ID NO: 18"
gagagacauucugagcaga

SEQ ID NO: 4042 - RNA, 19 nt, Artificial Sequence
  source: /note="Description of Artificial Sequence: Synthetic oligonucleotide"
  source: /note="Antisense strand to SEQ ID NO: 4041"
ucugcucagaaugucucuc

SEQ ID NO: 4043 - RNA, 19 nt, Artificial Sequence
  source: /note="Description of Artificial Sequence: Synthetic oligonucleotide"
  source: /note="Sense strand starting at position 2042 of SEQ ID NO: 99"
gcacgaugccgugcagaca

SEQ ID NO: 4044 - RNA, 19 nt, Artificial Sequence
  source: /note="Description of Artificial Sequence: Synthetic oligonucleotide"
  source: /note="Antisense strand to SEQ ID NO: 4043"
ugucugcacggcaucgugc

SEQ ID NO: 4045 - RNA, 19 nt, Artificial Sequence
  source: /note="Description of Artificial Sequence: Synthetic oligonucleotide"
  source: /note="Sense strand starting at position 2042 of SEQ ID NO: 593"
gcacgagggucucuguguu

SEQ ID NO: 4046 - RNA, 19 nt, Artificial Sequence
  source: /note="Description of Artificial Sequence: Synthetic oligonucleotide"
  source: /note="Antisense strand to SEQ ID NO: 4045"
aacacagagacccucgugc

SEQ ID NO: 4047 - RNA, 19 nt, Artificial Sequence
  source: /note="Description of Artificial Sequence: Synthetic oligonucleotide"
  source: /note="Sense strand starting at position 2042 of SEQ ID NO: 597"
gagggucucuguguuucca

SEQ ID NO: 4048 - RNA, 19 nt, Artificial Sequence
  source: /note="Description of Artificial Sequence: Synthetic oligonucleotide"
  source: /note="Antisense strand to SEQ ID NO: 4047"
uggaaacacagagacccuc

SEQ ID NO: 4049 - RNA, 19 nt, Artificial Sequence
  source: /note="Description of Artificial Sequence: Synthetic oligonucleotide"
  source: /note="Sense strand starting at position 2042 of SEQ ID NO: 599"
gggucucuguguuuccaga

SEQ ID NO: 4050 - RNA, 19 nt, Artificial Sequence
  source: /note="Description of Artificial Sequence: Synthetic oligonucleotide"
  source: /note="Antisense strand to SEQ ID NO: 4049"
ucuggaaacacagagaccc

SEQ ID NO: 4051 - RNA, 19 nt, Artificial Sequence
  source: /note="Description of Artificial Sequence: Synthetic oligonucleotide"
  source: /note="Sense strand starting at position 2042 of SEQ ID NO: 601"
gucucuguguuuccagaag

SEQ ID NO: 4052 - RNA, 19 nt, Artificial Sequence
  source: /note="Description of Artificial Sequence: Synthetic oligonucleotide"
  source: /note="Antisense strand to SEQ ID NO: 4051"
cuucuggaaacacagagac

SEQ ID NO: 4053 - RNA, 19 nt, Artificial Sequence
  source: /note="Description of Artificial Sequence: Synthetic oligonucleotide"
  source: /note="Sense strand starting at position 2042 of SEQ ID NO: 699"
ggugcugugaccgaugaga

SEQ ID NO: 4054 - RNA, 19 nt, Artificial Sequence
  source: /note="Description of Artificial Sequence: Synthetic oligonucleotide"
  source: /note="Antisense strand to SEQ ID NO: 4053"
ucucaucggucacagcacc

SEQ ID NO: 4055 - RNA, 19 nt, Artificial Sequence
  source: /note="Description of Artificial Sequence: Synthetic oligonucleotide"
  source: /note="Sense strand starting at position 2042 of SEQ ID NO: 1299"
ccgugcguucagugacuaa

SEQ ID NO: 4056 - RNA, 19 nt, Artificial Sequence
  source: /note="Description of Artificial Sequence: Synthetic oligonucleotide"
  source: /note="Antisense strand to SEQ ID NO: 4055"
uuagucacugaacgcacgg

SEQ ID NO: 4057 - RNA, 19 nt, Artificial Sequence
  source: /note="Description of Artificial Sequence: Synthetic oligonucleotide"
  source: /note="Sense strand starting at position 2042 of SEQ ID NO: 1504"
ggagacuccugguuuaccu

SEQ ID NO: 4058 - RNA, 19 nt, Artificial Sequence
  source: /note="Description of Artificial Sequence: Synthetic oligonucleotide"
  source: /note="Antisense strand to SEQ ID NO: 4057"
agguaaaccaggagucucc

SEQ ID NO: 4059 - RNA, 19 nt, Artificial Sequence
  source: /note="Description of Artificial Sequence: Synthetic oligonucleotide"
  source: /note="Sense strand starting at position 2042 of SEQ ID NO: 2152"
ucggaaagcgcucagaaga

SEQ ID NO: 4060 - RNA, 19 nt, Artificial Sequence
  source: /note="Description of Artificial Sequence: Synthetic oligonucleotide"
  source: /note="Antisense strand to SEQ ID NO: 4059"
ucuucugagcgcuuuccga

SEQ ID NO: 4061 - RNA, 19 nt, Artificial Sequence
  source: /note="Description of Artificial Sequence: Synthetic oligonucleotide"
  source: /note="Sense strand starting at position 2042 of SEQ ID NO: 2178"
gcccguuggugcuauguga

SEQ ID NO: 4062 - RNA, 19 nt, Artificial Sequence
  source: /note="Description of Artificial Sequence: Synthetic oligonucleotide"
  source: /note="Antisense strand to SEQ ID NO: 4061"
ucacauagcaccaacgggc

SEQ ID NO: 4063 - RNA, 19 nt, Artificial Sequence
  source: /note="Description of Artificial Sequence: Synthetic oligonucleotide"
  source: /note="Sense strand starting at position 2042 of SEQ ID NO: 2348"
ugaguaaagcgugcgcuuu

SEQ ID NO: 4064 - RNA, 19 nt, Artificial Sequence
  source: /note="Description of Artificial Sequence: Synthetic oligonucleotide"
  source: /note="Antisense strand to SEQ ID NO: 4063"
aaagcgcacgcuuuacuca

SEQ ID NO: 4065 - RNA, 19 nt, Artificial Sequence
  source: /note="Description of Artificial Sequence: Synthetic oligonucleotide"
  source: /note="Sense strand starting at position 2042 of SEQ ID NO: 2349"
gaguaaagcgugcgcuuua

SEQ ID NO: 4066 - RNA, 19 nt, Artificial Sequence
  source: /note="Description of Artificial Sequence: Synthetic oligonucleotide"
  source: /note="Antisense strand to SEQ ID NO: 4065"
uaaagcgcacgcuuuacuc

SEQ ID NO: 4067 - RNA, 19 nt, Artificial Sequence
  source: /note="Description of Artificial Sequence: Synthetic oligonucleotide"
  source: /note="Sense strand starting at position 2042 of SEQ ID NO: 2579"
guaggaugugcguagguaa

SEQ ID NO: 4068 - RNA, 19 nt, Artificial Sequence
  source: /note="Description of Artificial Sequence: Synthetic oligonucleotide"
  source: /note="Antisense strand to SEQ ID NO: 4067"
uuaccuacgcacauccuac

SEQ ID NO: 4069 - RNA, 19 nt, Artificial Sequence
  source: /note="Description of Artificial Sequence: Synthetic oligonucleotide"
  source: /note="Sense strand starting at position 2042 of SEQ ID NO: 2586"
gugcguagguaaugugcaa

SEQ ID NO: 4070 - RNA, 19 nt, Artificial Sequence
  source: /note="Description of Artificial Sequence: Synthetic oligonucleotide"
  source: /note="Antisense strand to SEQ ID NO: 4069"
uugcacauuaccuacgcac

SEQ ID NO: 4071 - RNA, 19 nt, Artificial Sequence
  source: /note="Description of Artificial Sequence: Synthetic oligonucleotide"
  source: /note="Sense strand starting at position 2042 of SEQ ID NO: 2860"
uugaaaucggccugggaga

SEQ ID NO: 4072 - RNA, 19 nt, Artificial Sequence
  source: /note="Description of Artificial Sequence: Synthetic oligonucleotide"
  source: /note="Antisense strand to SEQ ID NO: 4071"
ucucccaggccgauuucaa

SEQ ID NO: 4073 - RNA, 19 nt, Artificial Sequence
  source: /note="Description of Artificial Sequence: Synthetic oligonucleotide"
  source: /note="Sense strand starting at position 2042 of SEQ ID NO: 2861"
ugaaaucggccugggagau

SEQ ID NO: 4074 - RNA, 19 nt, Artificial Sequence
  source: /note="Description of Artificial Sequence: Synthetic oligonucleotide"
  source: /note="Antisense strand to SEQ ID NO: 4073"
aucucccaggccgauuuca

SEQ ID NO: 4075 - RNA, 19 nt, Artificial Sequence
  source: /note="Description of Artificial Sequence: Synthetic oligonucleotide"
  source: /note="Sense strand starting at position 2042 of SEQ ID NO: 2915"
gccagaugcgaugguauau

SEQ ID NO: 4076 - RNA, 19 nt, Artificial Sequence
  source: /note="Description of Artificial Sequence: Synthetic oligonucleotide"
  source: /note="Antisense strand to SEQ ID NO: 4075"
auauaccaucgcaucuggc

SEQ ID NO: 4077 - RNA, 19 nt, Artificial Sequence
  source: /note="Description of Artificial Sequence: Synthetic oligonucleotide"
  source: /note="Sense strand starting at position 2042 of SEQ ID NO: 2944"
cccagcuacccacgaaauu

SEQ ID NO: 4078 - RNA, 19 nt, Artificial Sequence
  source: /note="Description of Artificial Sequence: Synthetic oligonucleotide"
  source: /note="Antisense strand to SEQ ID NO: 4077"
aauuucguggguagcuggg

SEQ ID NO: 4079 - RNA, 19 nt, Artificial Sequence
  source: /note="Description of Artificial Sequence: Synthetic oligonucleotide"
  source: /note="Sense strand starting at position 2042 of SEQ ID NO: 2956"
cgaaauugaggugggagau

SEQ ID NO: 4080 - RNA, 19 nt, Artificial Sequence
  source: /note="Description of Artificial Sequence: Synthetic oligonucleotide"
  source: /note="Antisense strand to SEQ ID NO: 4079"
aucucccaccucaauuucg

SEQ ID NO: 4081 - RNA, 19 nt, Artificial Sequence
  source: /note="Description of Artificial Sequence: Synthetic oligonucleotide"
  source: /note="Sense strand starting at position 2042 of SEQ ID NO: 3137"
gaaggauaauuagaguuac

SEQ ID NO: 4082 - RNA, 19 nt, Artificial Sequence
  source: /note="Description of Artificial Sequence: Synthetic oligonucleotide"
  source: /note="Antisense strand to SEQ ID NO: 4081"
guaacucuaauuauccuuc

SEQ ID NO: 4083 - RNA, 19 nt, Artificial Sequence
  source: /note="Description of Artificial Sequence: Synthetic oligonucleotide"
  source: /note="Sense strand starting at position 2042 of SEQ ID NO: 3149"
gaguuacaguguucugggu

SEQ ID NO: 4084 - RNA, 19 nt, Artificial Sequence
  source: /note="Description of Artificial Sequence: Synthetic oligonucleotide"
  source: /note="Antisense strand to SEQ ID NO: 4083"
acccagaacacuguaacuc

SEQ ID NO: 4085 - RNA, 19 nt, Artificial Sequence
  source: /note="Description of Artificial Sequence: Synthetic oligonucleotide"
  source: /note="Sense strand starting at position 2042 of SEQ ID NO: 3153"
uacaguguucugggucuuu

SEQ ID NO: 4086 - RNA, 19 nt, Artificial Sequence
  source: /note="Description of Artificial Sequence: Synthetic oligonucleotide"
  source: /note="Antisense strand to SEQ ID NO: 4085"
aaagacccagaacacugua

SEQ ID NO: 4087 - RNA, 19 nt, Artificial Sequence
  source: /note="Description of Artificial Sequence: Synthetic oligonucleotide"
  source: /note="Sense strand starting at position 2042 of SEQ ID NO: 3209"
uaggucuucuuauguugaa

SEQ ID NO: 4088 - RNA, 19 nt, Artificial Sequence
  source: /note="Description of Artificial Sequence: Synthetic oligonucleotide"
  source: /note="Antisense strand to SEQ ID NO: 4087"
uucaacauaagaagaccua

SEQ ID NO: 4089 - RNA, 19 nt, Artificial Sequence
  source: /note="Description of Artificial Sequence: Synthetic oligonucleotide"
  source: /note="Sense strand starting at position 2042 of SEQ ID NO: 3210"
aggucuucuuauguugaaa

SEQ ID NO: 4090 - RNA, 19 nt, Artificial Sequence
  source: /note="Description of Artificial Sequence: Synthetic oligonucleotide"
  source: /note="Antisense strand to SEQ ID NO: 4089"
uuucaacauaagaagaccu

SEQ ID NO: 4091 - RNA, 19 nt, Artificial Sequence
  source: /note="Description of Artificial Sequence: Synthetic oligonucleotide"
  source: /note="Sense strand starting at position 2042 of SEQ ID NO: 3257"
agugaaauaguguguauau

SEQ ID NO: 4092 - RNA, 19 nt, Artificial Sequence
  source: /note="Description of Artificial Sequence: Synthetic oligonucleotide"
  source: /note="Antisense strand to SEQ ID NO: 4091"
auauacacacuauuucacu

SEQ ID NO: 4093 - RNA, 19 nt, Artificial Sequence
  source: /note="Description of Artificial Sequence: Synthetic oligonucleotide"
  source: /note="Sense strand starting at position 2042 of SEQ ID NO: 3258"
gugaaauaguguguauaua

SEQ ID NO: 4094 - RNA, 19 nt, Artificial Sequence
  source: /note="Description of Artificial Sequence: Synthetic oligonucleotide"
  source: /note="Antisense strand to SEQ ID NO: 4093"
uauauacacacuauuucac

SEQ ID NO: 4095 - RNA, 19 nt, Artificial Sequence
  source: /note="Description of Artificial Sequence: Synthetic oligonucleotide"
  source: /note="Sense strand starting at position 2042 of SEQ ID NO: 3266"
guguguauauauuccaaau

SEQ ID NO: 4096 - RNA, 19 nt, Artificial Sequence
  source: /note="Description of Artificial Sequence: Synthetic oligonucleotide"
  source: /note="Antisense strand to SEQ ID NO: 4095"
auuuggaauauauacacac

SEQ ID NO: 4097 - RNA, 19 nt, Artificial Sequence
  source: /note="Description of Artificial Sequence: Synthetic oligonucleotide"
  source: /note="Sense strand starting at position 2042 of SEQ ID NO: 3374"
acagaacugucuccaggaa

SEQ ID NO: 4098 - RNA, 19 nt, Artificial Sequence
  source: /note="Description of Artificial Sequence: Synthetic oligonucleotide"
  source: /note="Antisense strand to SEQ ID NO: 4097"
uuccuggagacaguucugu

SEQ ID NO: 4099 - RNA, 19 nt, Artificial Sequence
  source: /note="Description of Artificial Sequence: Synthetic oligonucleotide"
  source: /note="Sense strand starting at position 2042 of SEQ ID NO: 3444"
auggauaacucgcuuuaaa

SEQ ID NO: 4100 - RNA, 19 nt, Artificial Sequence
  source: /note="Description of Artificial Sequence: Synthetic oligonucleotide"
  source: /note="Antisense strand to SEQ ID NO: 4099"
uuuaaagcgaguuauccau

SEQ ID NO: 4101 - RNA, 19 nt, Artificial Sequence
  source: /note="Description of Artificial Sequence: Synthetic oligonucleotide"
  source: /note="Sense strand starting at position 2042 of SEQ ID NO: 3469"
uccucaaagcgucagagaa

SEQ ID NO: 4102 - RNA, 19 nt, Artificial Sequence
  source: /note="Description of Artificial Sequence: Synthetic oligonucleotide"
  source: /note="Antisense strand to SEQ ID NO: 4101"
uucucugacgcuuugagga

SEQ ID NO: 4103 - RNA, 19 nt, Artificial Sequence
  source: /note="Description of Artificial Sequence: Synthetic oligonucleotide"
  source: /note="Sense strand starting at position 2042 of SEQ ID NO: 3471"
cucaaagcgucagagaacu

SEQ ID NO: 4104 - RNA, 19 nt, Artificial Sequence
  source: /note="Description of Artificial Sequence: Synthetic oligonucleotide"
  source: /note="Antisense strand to SEQ ID NO: 4103"
aguucucugacgcuuugag

SEQ ID NO: 4105 - RNA, 19 nt, Artificial Sequence
  source: /note="Description of Artificial Sequence: Synthetic oligonucleotide"
  source: /note="Sense strand starting at position 2042 of SEQ ID NO: 3477"
gcgucagagaacugagaaa

SEQ ID NO: 4106 - RNA, 19 nt, Artificial Sequence
  source: /note="Description of Artificial Sequence: Synthetic oligonucleotide"
  source: /note="Antisense strand to SEQ ID NO: 4105"
uuucucaguucucugacgc

SEQ ID NO: 4107 - RNA, 19 nt, Artificial Sequence
  source: /note="Description of Artificial Sequence: Synthetic oligonucleotide"
  source: /note="Sense strand starting at position 2042 of SEQ ID NO: 3909"
ugaagccagccuuaaauca

SEQ ID NO: 4108 - RNA, 19 nt, Artificial Sequence
  source: /note="Description of Artificial Sequence: Synthetic oligonucleotide"
  source: /note="Antisense strand to SEQ ID NO: 4107"
ugauuuaaggcuggcuuca

SEQ ID NO: 4109 - RNA, 19 nt, Artificial Sequence
  source: /note="Description of Artificial Sequence: Synthetic oligonucleotide"
  source: /note="Sense strand starting at position 2043 of SEQ ID NO: 95"
augucuacuuucuggagaa

SEQ ID NO: 4110 - RNA, 19 nt, Artificial Sequence
  source: /note="Description of Artificial Sequence: Synthetic oligonucleotide"
  source: /note="Antisense strand to SEQ ID NO: 4109"
uucuccagaaaguagacau

SEQ ID NO: 4111 - RNA, 19 nt, Artificial Sequence
  source: /note="Description of Artificial Sequence: Synthetic oligonucleotide"
  source: /note="Sense strand starting at position 2043 of SEQ ID NO: 96"
ugucuacuuucuggagaau

SEQ ID NO: 4112 - RNA, 19 nt, Artificial Sequence
  source: /note="Description of Artificial Sequence: Synthetic oligonucleotide"
  source: /note="Antisense strand to SEQ ID NO: 4111"
auucuccagaaaguagaca

SEQ ID NO: 4113 - RNA, 19 nt, Artificial Sequence
  source: /note="Description of Artificial Sequence: Synthetic oligonucleotide"
  source: /note="Sense strand starting at position 2043 of SEQ ID NO: 122"
uugcaagacccucggcaau

SEQ ID NO: 4114 - RNA, 19 nt, Artificial Sequence
  source: /note="Description of Artificial Sequence: Synthetic oligonucleotide"
  source: /note="Antisense strand to SEQ ID NO: 4113"
auugccgagggucuugcaa

SEQ ID NO: 4115 - RNA, 19 nt, Artificial Sequence
  source: /note="Description of Artificial Sequence: Synthetic oligonucleotide"
  source: /note="Sense strand starting at position 2043 of SEQ ID NO: 193"
gaagucaucucguuucuuu

SEQ ID NO: 4116 - RNA, 19 nt, Artificial Sequence
  source: /note="Description of Artificial Sequence: Synthetic oligonucleotide"
  source: /note="Antisense strand to SEQ ID NO: 4115"
aaagaaacgagaugacuuc

SEQ ID NO: 4117 - RNA, 19 nt, Artificial Sequence
  source: /note="Description of Artificial Sequence: Synthetic oligonucleotide"
  source: /note="Sense strand starting at position 2043 of SEQ ID NO: 237"
ucaugucuuccuugauggu

SEQ ID NO: 4118 - RNA, 19 nt, Artificial Sequence
  source: /note="Description of Artificial Sequence: Synthetic oligonucleotide"
  source: /note="Antisense strand to SEQ ID NO: 4117"
accaucaaggaagacauga

SEQ ID NO: 4119 - RNA, 19 nt, Artificial Sequence
  source: /note="Description of Artificial Sequence: Synthetic oligonucleotide"
  source: /note="Sense strand starting at position 2043 of SEQ ID NO: 272"
augcucuggucaucuuuaa

SEQ ID NO: 4120 - RNA, 19 nt, Artificial Sequence
  source: /note="Description of Artificial Sequence: Synthetic oligonucleotide"
  source: /note="Antisense strand to SEQ ID NO: 4119"
uuaaagaugaccagagcau

SEQ ID NO: 4121 - RNA, 19 nt, Artificial Sequence
  source: /note="Description of Artificial Sequence: Synthetic oligonucleotide"
  source: /note="Sense strand starting at position 2043 of SEQ ID NO: 347"
ucacucuccuuggaaggaa

SEQ ID NO: 4122 - RNA, 19 nt, Artificial Sequence
  source: /note="Description of Artificial Sequence: Synthetic oligonucleotide"
  source: /note="Antisense strand to SEQ ID NO: 4121"
uuccuuccaaggagaguga

SEQ ID NO: 4123 - RNA, 19 nt, Artificial Sequence
  source: /note="Description of Artificial Sequence: Synthetic oligonucleotide"
  source: /note="Sense strand starting at position 2043 of SEQ ID NO: 374"
aacagaggaugaugugaau

SEQ ID NO: 4124 - RNA, 19 nt, Artificial Sequence
  source: /note="Description of Artificial Sequence: Synthetic oligonucleotide"
  source: /note="Antisense strand to SEQ ID NO: 4123"
auucacaucauccucuguu

SEQ ID NO: 4125 - RNA, 19 nt, Artificial Sequence
  source: /note="Description of Artificial Sequence: Synthetic oligonucleotide"
  source: /note="Sense strand starting at position 2043 of SEQ ID NO: 484"
guuccauuauccgcuacau

SEQ ID NO: 4126 - RNA, 19 nt, Artificial Sequence
  source: /note="Description of Artificial Sequence: Synthetic oligonucleotide"
  source: /note="Antisense strand to SEQ ID NO: 4125"
auguagcggauaauggaac

SEQ ID NO: 4127 - RNA, 19 nt, Artificial Sequence
  source: /note="Description of Artificial Sequence: Synthetic oligonucleotide"
  source: /note="Sense strand starting at position 2043 of SEQ ID NO: 594"
gaacucagaugugacaaua

SEQ ID NO: 4128 - RNA, 19 nt, Artificial Sequence
  source: /note="Description of Artificial Sequence: Synthetic oligonucleotide"
  source: /note="Antisense strand to SEQ ID NO: 4127"
uauugucacaucugaguuc

SEQ ID NO: 4129 - RNA, 19 nt, Artificial Sequence
  source: /note="Description of Artificial Sequence: Synthetic oligonucleotide"
  source: /note="Sense strand starting at position 2043 of SEQ ID NO: 667"
aaaggcuuaugugagauau

SEQ ID NO: 4130 - RNA, 19 nt, Artificial Sequence
  source: /note="Description of Artificial Sequence: Synthetic oligonucleotide"
  source: /note="Antisense strand to SEQ ID NO: 4129"
auaucucacauaagccuuu

SEQ ID NO: 4131 - RNA, 19 nt, Artificial Sequence
  source: /note="Description of Artificial Sequence: Synthetic oligonucleotide"
  source: /note="Sense strand starting at position 2043 of SEQ ID NO: 669"
aggcuuaugugagauauag

SEQ ID NO: 4132 - RNA, 19 nt, Artificial Sequence
  source: /note="Description of Artificial Sequence: Synthetic oligonucleotide"
  source: /note="Antisense strand to SEQ ID NO: 4131"
cuauaucucacauaagccu

SEQ ID NO: 4133 - RNA, 19 nt, Artificial Sequence
  source: /note="Description of Artificial Sequence: Synthetic oligonucleotide"
  source: /note="Sense strand starting at position 2043 of SEQ ID NO: 740"
auugcaaugucacaaauga

SEQ ID NO: 4134 - RNA, 19 nt, Artificial Sequence
  source: /note="Description of Artificial Sequence: Synthetic oligonucleotide"
  source: /note="Antisense strand to SEQ ID NO: 4133"
ucauuugugacauugcaau

SEQ ID NO: 4135 - RNA, 19 nt, Artificial Sequence
  source: /note="Description of Artificial Sequence: Synthetic oligonucleotide"
  source: /note="Sense strand starting at position 2043 of SEQ ID NO: 890"
gguacagguuucuauuaca

SEQ ID NO: 4136 - RNA, 19 nt, Artificial Sequence
  source: /note="Description of Artificial Sequence: Synthetic oligonucleotide"
  source: /note="Antisense strand to SEQ ID NO: 4135"
uguaauagaaaccuguacc

SEQ ID NO: 4137 - RNA, 19 nt, Artificial Sequence
  source: /note="Description of Artificial Sequence: Synthetic oligonucleotide"
  source: /note="Sense strand starting at position 2043 of SEQ ID NO: 893"
acagguuucuauuacaucu

SEQ ID NO: 4138 - RNA, 19 nt, Artificial Sequence
  source: /note="Description of Artificial Sequence: Synthetic oligonucleotide"
  source: /note="Antisense strand to SEQ ID NO: 4137"
agauguaauagaaaccugu

SEQ ID NO: 4139 - RNA, 19 nt, Artificial Sequence
  source: /note="Description of Artificial Sequence: Synthetic oligonucleotide"
  source: /note="Sense strand starting at position 2043 of SEQ ID NO: 914"
ugugccuuccuguagggua

SEQ ID NO: 4140 - RNA, 19 nt, Artificial Sequence
  source: /note="Description of Artificial Sequence: Synthetic oligonucleotide"
  source: /note="Antisense strand to SEQ ID NO: 4139"
uacccuacaggaaggcaca

SEQ ID NO: 4141 - RNA, 19 nt, Artificial Sequence
  source: /note="Description of Artificial Sequence: Synthetic oligonucleotide"
  source: /note="Sense strand starting at position 2043 of SEQ ID NO: 917"
gccuuccuguaggguauua

SEQ ID NO: 4142 - RNA, 19 nt, Artificial Sequence
  source: /note="Description of Artificial Sequence: Synthetic oligonucleotide"
  source: /note="Antisense strand to SEQ ID NO: 4141"
uaauacccuacaggaaggc

SEQ ID NO: 4143 - RNA, 19 nt, Artificial Sequence
  source: /note="Description of Artificial Sequence: Synthetic oligonucleotide"
  source: /note="Sense strand starting at position 2043 of SEQ ID NO: 922"
ccuguaggguauuauuaua

SEQ ID NO: 4144 - RNA, 19 nt, Artificial Sequence
  source: /note="Description of Artificial Sequence: Synthetic oligonucleotide"
  source: /note="Antisense strand to SEQ ID NO: 4143"
uauaauaauacccuacagg

SEQ ID NO: 4145 - RNA, 19 nt, Artificial Sequence
  source: /note="Description of Artificial Sequence: Synthetic oligonucleotide"
  source: /note="Sense strand starting at position 2043 of SEQ ID NO: 929"
gguauuauuauacgagcuu

SEQ ID NO: 4146 - RNA, 19 nt, Artificial Sequence
  source: /note="Description of Artificial Sequence: Synthetic oligonucleotide"
  source: /note="Antisense strand to SEQ ID NO: 4145"
aagcucguauaauaauacc

SEQ ID NO: 4147 - RNA, 19 nt, Artificial Sequence
  source: /note="Description of Artificial Sequence: Synthetic oligonucleotide"
  source: /note="Sense strand starting at position 2043 of SEQ ID NO: 930"
guauuauuauacgagcuuu

SEQ ID NO: 4148 - RNA, 19 nt, Artificial Sequence
  source: /note="Description of Artificial Sequence: Synthetic oligonucleotide"
  source: /note="Antisense strand to SEQ ID NO: 4147"
aaagcucguauaauaauac

SEQ ID NO: 4149 - RNA, 19 nt, Artificial Sequence
  source: /note="Description of Artificial Sequence: Synthetic oligonucleotide"
  source: /note="Sense strand starting at position 2043 of SEQ ID NO: 957"
guuccaaacaugugcgagu

SEQ ID NO: 4150 - RNA, 19 nt, Artificial Sequence
  source: /note="Description of Artificial Sequence: Synthetic oligonucleotide"
  source: /note="Antisense strand to SEQ ID NO: 4149"
acucgcacauguuuggaac

SEQ ID NO: 4151 - RNA, 19 nt, Artificial Sequence
  source: /note="Description of Artificial Sequence: Synthetic oligonucleotide"
  source: /note="Sense strand starting at position 2043 of SEQ ID NO: 1265"
gaagcagaauguugaaauc

SEQ ID NO: 4152 - RNA, 19 nt, Artificial Sequence
  source: /note="Description of Artificial Sequence: Synthetic oligonucleotide"
  source: /note="Antisense strand to SEQ ID NO: 4151"
gauuucaacauucugcuuc

SEQ ID NO: 4153 - RNA, 19 nt, Artificial Sequence
  source: /note="Description of Artificial Sequence: Synthetic oligonucleotide"
  source: /note="Sense strand starting at position 2043 of SEQ ID NO: 1395"
cuuagagucugagaaguca

SEQ ID NO: 4154 - RNA, 19 nt, Artificial Sequence
  source: /note="Description of Artificial Sequence: Synthetic oligonucleotide"
  source: /note="Antisense strand to SEQ ID NO: 4153"
ugacuucucagacucuaag

SEQ ID NO: 4155 - RNA, 19 nt, Artificial Sequence
  source: /note="Description of Artificial Sequence: Synthetic oligonucleotide"
  source: /note="Sense strand starting at position 2043 of SEQ ID NO: 1676"
augacagccuaucagagau

SEQ ID NO: 4156 - RNA, 19 nt, Artificial Sequence
  source: /note="Description of Artificial Sequence: Synthetic oligonucleotide"
  source: /note="Antisense strand to SEQ ID NO: 4155"
aucucugauaggcugucau

SEQ ID NO: 4157 - RNA, 19 nt, Artificial Sequence
  source: /note="Description of Artificial Sequence: Synthetic oligonucleotide"
  source: /note="Sense strand starting at position 2043 of SEQ ID NO: 1695"
gcuacagcaagucgauauu

SEQ ID NO: 4158 - RNA, 19 nt, Artificial Sequence
  source: /note="Description of Artificial Sequence: Synthetic oligonucleotide"
  source: /note="Antisense strand to SEQ ID NO: 4157"
aauaucgacuugcuguagc

SEQ ID NO: 4159 - RNA, 19 nt, Artificial Sequence
  source: /note="Description of Artificial Sequence: Synthetic oligonucleotide"
  source: /note="Sense strand starting at position 2043 of SEQ ID NO: 1792"
acauauggguccuggcagu

SEQ ID NO: 4160 - RNA, 19 nt, Artificial Sequence
  source: /note="Description of Artificial Sequence: Synthetic oligonucleotide"
  source: /note="Antisense strand to SEQ ID NO: 4159"
acugccaggacccauaugu

SEQ ID NO: 4161 - RNA, 19 nt, Artificial Sequence
  source: /note="Description of Artificial Sequence: Synthetic oligonucleotide"
  source: /note="Sense strand starting at position 2043 of SEQ ID NO: 1869"
uuucaucguuuccgagaga

SEQ ID NO: 4162 - RNA, 19 nt, Artificial Sequence
  source: /note="Description of Artificial Sequence: Synthetic oligonucleotide"
  source: /note="Antisense strand to SEQ ID NO: 4161"
ucucucggaaacgaugaaa

SEQ ID NO: 4163 - RNA, 19 nt, Artificial Sequence
  source: /note="Description of Artificial Sequence: Synthetic oligonucleotide"
  source: /note="Sense strand starting at position 2043 of SEQ ID NO: 1870"
uucaucguuuccgagagaa

SEQ ID NO: 4164 - RNA, 19 nt, Artificial Sequence
  source: /note="Description of Artificial Sequence: Synthetic oligonucleotide"
  source: /note="Antisense strand to SEQ ID NO: 4163"
uucucucggaaacgaugaa

SEQ ID NO: 4165 - RNA, 19 nt, Artificial Sequence
  source: /note="Description of Artificial Sequence: Synthetic oligonucleotide"
  source: /note="Sense strand starting at position 2043 of SEQ ID NO: 1908"
aucaguaguucuuguauca

SEQ ID NO: 4166 - RNA, 19 nt, Artificial Sequence
  source: /note="Description of Artificial Sequence: Synthetic oligonucleotide"
  source: /note="Antisense strand to SEQ ID NO: 4165"
ugauacaagaacuacugau

SEQ ID NO: 4167 - RNA, 19 nt, Artificial Sequence
  source: /note="Description of Artificial Sequence: Synthetic oligonucleotide"
  source: /note="Sense strand starting at position 2043 of SEQ ID NO: 2011"
ucuggcugcugguauuuau

SEQ ID NO: 4168 - RNA, 19 nt, Artificial Sequence
  source: /note="Description of Artificial Sequence: Synthetic oligonucleotide"
  source: /note="Antisense strand to SEQ ID NO: 4167"
auaaauaccagcagccaga

SEQ ID NO: 4169 - RNA, 19 nt, Artificial Sequence
  source: /note="Description of Artificial Sequence: Synthetic oligonucleotide"
  source: /note="Sense strand starting at position 2043 of SEQ ID NO: 2035"
auugaagucuccugaggau

SEQ ID NO: 4170 - RNA, 19 nt, Artificial Sequence
  source: /note="Description of Artificial Sequence: Synthetic oligonucleotide"
  source: /note="Antisense strand to SEQ ID NO: 4169"
auccucaggagacuucaau

SEQ ID NO: 4171 - RNA, 19 nt, Artificial Sequence
  source: /note="Description of Artificial Sequence: Synthetic oligonucleotide"
  source: /note="Sense strand starting at position 2043 of SEQ ID NO: 2038"
gaagucuccugaggauuac

SEQ ID NO: 4172 - RNA, 19 nt, Artificial Sequence
  source: /note="Description of Artificial Sequence: Synthetic oligonucleotide"
  source: /note="Antisense strand to SEQ ID NO: 4171"
guaauccucaggagacuuc

SEQ ID NO: 4173 - RNA, 19 nt, Artificial Sequence
  source: /note="Description of Artificial Sequence: Synthetic oligonucleotide"
  source: /note="Sense strand starting at position 2043 of SEQ ID NO: 2044"
uccugaggauuacguauuu

SEQ ID NO: 4174 - RNA, 19 nt, Artificial Sequence
  source: /note="Description of Artificial Sequence: Synthetic oligonucleotide"
  source: /note="Antisense strand to SEQ ID NO: 4173"
aaauacguaauccucagga

SEQ ID NO: 4175 - RNA, 19 nt, Artificial Sequence
  source: /note="Description of Artificial Sequence: Synthetic oligonucleotide"
  source: /note="Sense strand starting at position 2043 of SEQ ID NO: 2137"
gcauuuggguguuguaguu

SEQ ID NO: 4176 - RNA, 19 nt, Artificial Sequence
  source: /note="Description of Artificial Sequence: Synthetic oligonucleotide"
  source: /note="Antisense strand to SEQ ID NO: 4175"
aacuacaacacccaaaugc

SEQ ID NO: 4177 - RNA, 19 nt, Artificial Sequence
  source: /note="Description of Artificial Sequence: Synthetic oligonucleotide"
  source: /note="Sense strand starting at position 2043 of SEQ ID NO: 2142"
uggguguuguaguuagagu

SEQ ID NO: 4178 - RNA, 19 nt, Artificial Sequence
  source: /note="Description of Artificial Sequence: Synthetic oligonucleotide"
  source: /note="Antisense strand to SEQ ID NO: 4177"
acucuaacuacaacaccca

SEQ ID NO: 4179 - RNA, 19 nt, Artificial Sequence
  source: /note="Description of Artificial Sequence: Synthetic oligonucleotide"
  source: /note="Sense strand starting at position 2043 of SEQ ID NO: 2143"
ggguguuguaguuagaguu

SEQ ID NO: 4180 - RNA, 19 nt, Artificial Sequence
  source: /note="Description of Artificial Sequence: Synthetic oligonucleotide"
  source: /note="Antisense strand to SEQ ID NO: 4179"
aacucuaacuacaacaccc

SEQ ID NO: 4181 - RNA, 19 nt, Artificial Sequence
  source: /note="Description of Artificial Sequence: Synthetic oligonucleotide"
  source: /note="Sense strand starting at position 2043 of SEQ ID NO: 2216"
gugccauucuggugggauu

SEQ ID NO: 4182 - RNA, 19 nt, Artificial Sequence
  source: /note="Description of Artificial Sequence: Synthetic oligonucleotide"
  source: /note="Antisense strand to SEQ ID NO: 4181"
aaucccaccagaauggcac

SEQ ID NO: 4183 - RNA, 19 nt, Artificial Sequence
  source: /note="Description of Artificial Sequence: Synthetic oligonucleotide"
  source: /note="Sense strand starting at position 2043 of SEQ ID NO: 2227"
gugggauucuuugaaggca

SEQ ID NO: 4184 - RNA, 19 nt, Artificial Sequence
  source: /note="Description of Artificial Sequence: Synthetic oligonucleotide"
  source: /note="Antisense strand to SEQ ID NO: 4183"
ugccuucaaagaaucccac

SEQ ID NO: 4185 - RNA, 19 nt, Artificial Sequence
  source: /note="Description of Artificial Sequence: Synthetic oligonucleotide"
  source: /note="Sense strand starting at position 2043 of SEQ ID NO: 2291"
cccacuucgcccugguaaa

SEQ ID NO: 4186 - RNA, 19 nt, Artificial Sequence
  source: /note="Description of Artificial Sequence: Synthetic oligonucleotide"
  source: /note="Antisense strand to SEQ ID NO: 4185"
uuuaccagggcgaaguggg

SEQ ID NO: 4187 - RNA, 19 nt, Artificial Sequence
  source: /note="Description of Artificial Sequence: Synthetic oligonucleotide"
  source: /note="Sense strand starting at position 2043 of SEQ ID NO: 2704"
cuacauuguuaauaaggua

SEQ ID NO: 4188 - RNA, 19 nt, Artificial Sequence
  source: /note="Description of Artificial Sequence: Synthetic oligonucleotide"
  source: /note="Antisense strand to SEQ ID NO: 4187"
uaccuuauuaacaauguag

SEQ ID NO: 4189 - RNA, 19 nt, Artificial Sequence
  source: /note="Description of Artificial Sequence: Synthetic oligonucleotide"
  source: /note="Sense strand starting at position 2043 of SEQ ID NO: 3142"
uuggucuagucguauuuca

SEQ ID NO: 4190 - RNA, 19 nt, Artificial Sequence
  source: /note="Description of Artificial Sequence: Synthetic oligonucleotide"
  source: /note="Antisense strand to SEQ ID NO: 4189"
ugaaauacgacuagaccaa

SEQ ID NO: 4191 - RNA, 19 nt, Artificial Sequence
  source: /note="Description of Artificial Sequence: Synthetic oligonucleotide"
  source: /note="Sense strand starting at position 2043 of SEQ ID NO: 3179"
acugcuaggugcuacuaua

SEQ ID NO: 4192 - RNA, 19 nt, Artificial Sequence
  source: /note="Description of Artificial Sequence: Synthetic oligonucleotide"
  source: /note="Antisense strand to SEQ ID NO: 4191"
uauaguagcaccuagcagu

SEQ ID NO: 4193 - RNA, 19 nt, Artificial Sequence
  source: /note="Description of Artificial Sequence: Synthetic oligonucleotide"
  source: /note="Sense strand starting at position 2043 of SEQ ID NO: 3400"
cuaccuguacuguguacau

SEQ ID NO: 4194 - RNA, 19 nt, Artificial Sequence
  source: /note="Description of Artificial Sequence: Synthetic oligonucleotide"
  source: /note="Antisense strand to SEQ ID NO: 4193"
auguacacaguacagguag

SEQ ID NO: 4195 - RNA, 19 nt, Artificial Sequence
  source: /note="Description of Artificial Sequence: Synthetic oligonucleotide"
  source: /note="Sense strand starting at position 2043 of SEQ ID NO: 3409"
cuguguacauaacaguauu

SEQ ID NO: 4196 - RNA, 19 nt, Artificial Sequence
  source: /note="Description of Artificial Sequence: Synthetic oligonucleotide"
  source: /note="Antisense strand to SEQ ID NO: 4195"
aauacuguuauguacacag

SEQ ID NO: 4197 - RNA, 19 nt, Artificial Sequence
  source: /note="Description of Artificial Sequence: Synthetic oligonucleotide"
  source: /note="Sense strand starting at position 2043 of SEQ ID NO: 3417"
auaacaguauugcaguuau

SEQ ID NO: 4198 - RNA, 19 nt, Artificial Sequence
  source: /note="Description of Artificial Sequence: Synthetic oligonucleotide"
  source: /note="Antisense strand to SEQ ID NO: 4197"
auaacugcaauacuguuau

SEQ ID NO: 4199 - RNA, 19 nt, Artificial Sequence
  source: /note="Description of Artificial Sequence: Synthetic oligonucleotide"
  source: /note="Sense strand starting at position 2043 of SEQ ID NO: 3471"
gcuauaugauugugaguua

SEQ ID NO: 4200 - RNA, 19 nt, Artificial Sequence
  source: /note="Description of Artificial Sequence: Synthetic oligonucleotide"
  source: /note="Antisense strand to SEQ ID NO: 4199"
uaacucacaaucauauagc

SEQ ID NO: 4201 - RNA, 19 nt, Artificial Sequence
  source: /note="Description of Artificial Sequence: Synthetic oligonucleotide"
  source: /note="Sense strand starting at position 2043 of SEQ ID NO: 3472"
cuauaugauugugaguuag

SEQ ID NO: 4202 - RNA, 19 nt, Artificial Sequence
  source: /note="Description of Artificial Sequence: Synthetic oligonucleotide"
  source: /note="Antisense strand to SEQ ID NO: 4201"
cuaacucacaaucauauag

SEQ ID NO: 4203 - RNA, 19 nt, Artificial Sequence
  source: /note="Description of Artificial Sequence: Synthetic oligonucleotide"
  source: /note="Sense strand starting at position 2043 of SEQ ID NO: 3478"
gauugugaguuagcuucuu

SEQ ID NO: 4204 - RNA, 19 nt, Artificial Sequence
  source: /note="Description of Artificial Sequence: Synthetic oligonucleotide"
  source: /note="Antisense strand to SEQ ID NO: 4203"
aagaagcuaacucacaauc

SEQ ID NO: 4205 - RNA, 19 nt, Artificial Sequence
  source: /note="Description of Artificial Sequence: Synthetic oligonucleotide"
  source: /note="Sense strand starting at position 2043 of SEQ ID NO: 3535"
gcuugauaauaguaucuuc

SEQ ID NO: 4206 - RNA, 19 nt, Artificial Sequence
  source: /note="Description of Artificial Sequence: Synthetic oligonucleotide"
  source: /note="Antisense strand to SEQ ID NO: 4205"
gaagauacuauuaucaagc

SEQ ID NO: 4207 - RNA, 19 nt, Artificial Sequence
  source: /note="Description of Artificial Sequence: Synthetic oligonucleotide"
  source: /note="Sense strand starting at position 2043 of SEQ ID NO: 3581"
agguaauccucauaaagug

SEQ ID NO: 4208 - RNA, 19 nt, Artificial Sequence
  source: /note="Description of Artificial Sequence: Synthetic oligonucleotide"
  source: /note="Antisense strand to SEQ ID NO: 4207"
cacuuuaugaggauuaccu

SEQ ID NO: 4209 - RNA, 19 nt, Artificial Sequence
  source: /note="Description of Artificial Sequence: Synthetic oligonucleotide"
  source: /note="Sense strand starting at position 2044 of SEQ ID NO: 38"
ggugaaugauguuuccucu

SEQ ID NO: 4210 - RNA, 19 nt, Artificial Sequence
  source: /note="Description of Artificial Sequence: Synthetic oligonucleotide"
  source: /note="Antisense strand to SEQ ID NO: 4209"
agaggaaacaucauucacc

SEQ ID NO: 4211 - RNA, 19 nt, Artificial Sequence
  source: /note="Description of Artificial Sequence: Synthetic oligonucleotide"
  source: /note="Sense strand starting at position 2044 of SEQ ID NO: 149"
gggaguaguuaauaaccca

SEQ ID NO: 4212 - RNA, 19 nt, Artificial Sequence
  source: /note="Description of Artificial Sequence: Synthetic oligonucleotide"
  source: /note="Antisense strand to SEQ ID NO: 4211"
uggguuauuaacuacuccc

SEQ ID NO: 4213 - RNA, 19 nt, Artificial Sequence
  source: /note="Description of Artificial Sequence: Synthetic oligonucleotide"
  source: /note="Sense strand starting at position 2044 of SEQ ID NO: 189"
gaaagcuguuugcaaauuu

SEQ ID NO: 4214 - RNA, 19 nt, Artificial Sequence
  source: /note="Description of Artificial Sequence: Synthetic oligonucleotide"
  source: /note="Antisense strand to SEQ ID NO: 4213"
aaauuugcaaacagcuuuc

SEQ ID NO: 4215 - RNA, 19 nt, Artificial Sequence
  source: /note="Description of Artificial Sequence: Synthetic oligonucleotide"
  source: /note="Sense strand starting at position 2044 of SEQ ID NO: 353"
gucuguaggagaugguauu

SEQ ID NO: 4216 - RNA, 19 nt, Artificial Sequence
  source: /note="Description of Artificial Sequence: Synthetic oligonucleotide"
  source: /note="Antisense strand to SEQ ID NO: 4215"
aauaccaucuccuacagac

SEQ ID NO: 4217 - RNA, 19 nt, Artificial Sequence
  source: /note="Description of Artificial Sequence: Synthetic oligonucleotide"
  source: /note="Sense strand starting at position 2044 of SEQ ID NO: 430"
gccugagggucuucagguu

SEQ ID NO: 4218 - RNA, 19 nt, Artificial Sequence
  source: /note="Description of Artificial Sequence: Synthetic oligonucleotide"
  source: /note="Antisense strand to SEQ ID NO: 4217"
aaccugaagacccucaggc

SEQ ID NO: 4219 - RNA, 19 nt, Artificial Sequence
  source: /note="Description of Artificial Sequence: Synthetic oligonucleotide"
  source: /note="Sense strand starting at position 2044 of SEQ ID NO: 526"
acuggaucaucucagacaa

SEQ ID NO: 4220 - RNA, 19 nt, Artificial Sequence
  source: /note="Description of Artificial Sequence: Synthetic oligonucleotide"
  source: /note="Antisense strand to SEQ ID NO: 4219"
uugucugagaugauccagu

SEQ ID NO: 4221 - RNA, 19 nt, Artificial Sequence
  source: /note="Description of Artificial Sequence: Synthetic oligonucleotide"
  source: /note="Sense strand starting at position 2044 of SEQ ID NO: 645"
acagcuugguucuagcgau

SEQ ID NO: 4222 - RNA, 19 nt, Artificial Sequence
  source: /note="Description of Artificial Sequence: Synthetic oligonucleotide"
  source: /note="Antisense strand to SEQ ID NO: 4221"
aucgcuagaaccaagcugu

SEQ ID NO: 4223 - RNA, 19 nt, Artificial Sequence
  source: /note="Description of Artificial Sequence: Synthetic oligonucleotide"
  source: /note="Sense strand starting at position 2044 of SEQ ID NO: 720"
gcuggaugugcugaguuaa

SEQ ID NO: 4224 - RNA, 19 nt, Artificial Sequence
  source: /note="Description of Artificial Sequence: Synthetic oligonucleotide"
  source: /note="Antisense strand to SEQ ID NO: 4223"
uuaacucagcacauccagc

SEQ ID NO: 4225 - RNA, 19 nt, Artificial Sequence
  source: /note="Description of Artificial Sequence: Synthetic oligonucleotide"
  source: /note="Sense strand starting at position 2044 of SEQ ID NO: 1184"
ucuucuuucugcggagcua

SEQ ID NO: 4226 - RNA, 19 nt, Artificial Sequence
  source: /note="Description of Artificial Sequence: Synthetic oligonucleotide"
  source: /note="Antisense strand to SEQ ID NO: 4225"
uagcuccgcagaaagaaga

SEQ ID NO: 4227 - RNA, 19 nt, Artificial Sequence
  source: /note="Description of Artificial Sequence: Synthetic oligonucleotide"
  source: /note="Sense strand starting at position 2044 of SEQ ID NO: 1196"
ggagcuacauucggcuuua

SEQ ID NO: 4228 - RNA, 19 nt, Artificial Sequence
  source: /note="Description of Artificial Sequence: Synthetic oligonucleotide"
  source: /note="Antisense strand to SEQ ID NO: 4227"
uaaagccgaauguagcucc

SEQ ID NO: 4229 - RNA, 19 nt, Artificial Sequence
  source: /note="Description of Artificial Sequence: Synthetic oligonucleotide"
  source: /note="Sense strand starting at position 2044 of SEQ ID NO: 1197"
gagcuacauucggcuuuaa

SEQ ID NO: 4230 - RNA, 19 nt, Artificial Sequence
  source: /note="Description of Artificial Sequence: Synthetic oligonucleotide"
  source: /note="Antisense strand to SEQ ID NO: 4229"
uuaaagccgaauguagcuc

SEQ ID NO: 4231 - RNA, 19 nt, Artificial Sequence
  source: /note="Description of Artificial Sequence: Synthetic oligonucleotide"
  source: /note="Sense strand starting at position 2044 of SEQ ID NO: 1299"
caguuuagcuuggaaagau

SEQ ID NO: 4232 - RNA, 19 nt, Artificial Sequence
  source: /note="Description of Artificial Sequence: Synthetic oligonucleotide"
  source: /note="Antisense strand to SEQ ID NO: 4231"
aucuuuccaagcuaaacug

SEQ ID NO: 4233 - RNA, 19 nt, Artificial Sequence
  source: /note="Description of Artificial Sequence: Synthetic oligonucleotide"
  source: /note="Sense strand starting at position 2044 of SEQ ID NO: 1308"
uuggaaagaucccagggau

SEQ ID NO: 4234 - RNA, 19 nt, Artificial Sequence
  source: /note="Description of Artificial Sequence: Synthetic oligonucleotide"
  source: /note="Antisense strand to SEQ ID NO: 4233"
aucccugggaucuuuccaa

SEQ ID NO: 4235 - RNA, 19 nt, Artificial Sequence
  source: /note="Description of Artificial Sequence: Synthetic oligonucleotide"
  source: /note="Sense strand starting at position 2044 of SEQ ID NO: 1345"
gcagguuucccucauguag

SEQ ID NO: 4236 - RNA, 19 nt, Artificial Sequence
  source: /note="Description of Artificial Sequence: Synthetic oligonucleotide"
  source: /note="Antisense strand to SEQ ID NO: 4235"
cuacaugagggaaaccugc

SEQ ID NO: 4237 - RNA, 19 nt, Artificial Sequence
  source: /note="Description of Artificial Sequence: Synthetic oligonucleotide"
  source: /note="Sense strand starting at position 2044 of SEQ ID NO: 1347"
agguuucccucauguagag

SEQ ID NO: 4238 - RNA, 19 nt, Artificial Sequence
  source: /note="Description of Artificial Sequence: Synthetic oligonucleotide"
  source: /note="Antisense strand to SEQ ID NO: 4237"
cucuacaugagggaaaccu

SEQ ID NO: 4239 - RNA, 19 nt, Artificial Sequence
  source: /note="Description of Artificial Sequence: Synthetic oligonucleotide"
  source: /note="Sense strand starting at position 2044 of SEQ ID NO: 1357"
cauguagagugcuucccua

SEQ ID NO: 4240 - RNA, 19 nt, Artificial Sequence
  source: /note="Description of Artificial Sequence: Synthetic oligonucleotide"
  source: /note="Antisense strand to SEQ ID NO: 4239"
uagggaagcacucuacaug

SEQ ID NO: 4241 - RNA, 19 nt, Artificial Sequence
  source: /note="Description of Artificial Sequence: Synthetic oligonucleotide"
  source: /note="Sense strand starting at position 2044 of SEQ ID NO: 1509"
ccagcaggaucuuauaagu

SEQ ID NO: 4242 - RNA, 19 nt, Artificial Sequence
  source: /note="Description of Artificial Sequence: Synthetic oligonucleotide"
  source: /note="Antisense strand to SEQ ID NO: 4241"
acuuauaagauccugcugg

SEQ ID NO: 4243 - RNA, 19 nt, Artificial Sequence
  source: /note="Description of Artificial Sequence: Synthetic oligonucleotide"
  source: /note="Sense strand starting at position 2044 of SEQ ID NO: 1525"
aguuucucagcacgagaga

SEQ ID NO: 4244 - RNA, 19 nt, Artificial Sequence
  source: /note="Description of Artificial Sequence: Synthetic oligonucleotide"
  source: /note="Antisense strand to SEQ ID NO: 4243"
ucucucgugcugagaaacu

SEQ ID NO: 4245 - RNA, 19 nt, Artificial Sequence
  source: /note="Description of Artificial Sequence: Synthetic oligonucleotide"
  source: /note="Sense strand starting at position 2044 of SEQ ID NO: 1548"
gcauuuacuuuauaaggca

SEQ ID NO: 4246 - RNA, 19 nt, Artificial Sequence
  source: /note="Description of Artificial Sequence: Synthetic oligonucleotide"
  source: /note="Antisense strand to SEQ ID NO: 4245"
ugccuuauaaaguaaaugc

SEQ ID NO: 4247 - RNA, 19 nt, Artificial Sequence
  source: /note="Description of Artificial Sequence: Synthetic oligonucleotide"
  source: /note="Sense strand starting at position 2044 of SEQ ID NO: 1585"
uguaucaucuggcuuagcu

SEQ ID NO: 4248 - RNA, 19 nt, Artificial Sequence
  source: /note="Description of Artificial Sequence: Synthetic oligonucleotide"
  source: /note="Antisense strand to SEQ ID NO: 4247"
agcuaagccagaugauaca

SEQ ID NO: 4249 - RNA, 19 nt, Artificial Sequence
  source: /note="Description of Artificial Sequence: Synthetic oligonucleotide"
  source: /note="Sense strand starting at position 2044 of SEQ ID NO: 1629"
cuaggauucucuuaagaau

SEQ ID NO: 4250 - RNA, 19 nt, Artificial Sequence
  source: /note="Description of Artificial Sequence: Synthetic oligonucleotide"
  source: /note="Antisense strand to SEQ ID NO: 4249"
auucuuaagagaauccuag

SEQ ID NO: 4251 - RNA, 19 nt, Artificial Sequence
  source: /note="Description of Artificial Sequence: Synthetic oligonucleotide"
  source: /note="Sense strand starting at position 2044 of SEQ ID NO: 1701"
uucuuauaguuccaggaga

SEQ ID NO: 4252 - RNA, 19 nt, Artificial Sequence
  source: /note="Description of Artificial Sequence: Synthetic oligonucleotide"
  source: /note="Antisense strand to SEQ ID NO: 4251"
ucuccuggaacuauaagaa

SEQ ID NO: 4253 - RNA, 19 nt, Artificial Sequence
  source: /note="Description of Artificial Sequence: Synthetic oligonucleotide"
  source: /note="Sense strand starting at position 2044 of SEQ ID NO: 1798"
gaaggcaucucggagaucu

SEQ ID NO: 4254 - RNA, 19 nt, Artificial Sequence
  source: /note="Description of Artificial Sequence: Synthetic oligonucleotide"
  source: /note="Antisense strand to SEQ ID NO: 4253"
agaucuccgagaugccuuc

SEQ ID NO: 4255 - RNA, 19 nt, Artificial Sequence
  source: /note="Description of Artificial Sequence: Synthetic oligonucleotide"
  source: /note="Sense strand starting at position 2044 of SEQ ID NO: 1829"
ggcagguugccugggaagu

SEQ ID NO: 4256 - RNA, 19 nt, Artificial Sequence
  source: /note="Description of Artificial Sequence: Synthetic oligonucleotide"
  source: /note="Antisense strand to SEQ ID NO: 4255"
acuucccaggcaaccugcc

SEQ ID NO: 4257 - RNA, 19 nt, Artificial Sequence
  source: /note="Description of Artificial Sequence: Synthetic oligonucleotide"
  source: /note="Sense strand starting at position 2044 of SEQ ID NO: 1952"
gcaagucugucuugugguu

SEQ ID NO: 4258 - RNA, 19 nt, Artificial Sequence
  source: /note="Description of Artificial Sequence: Synthetic oligonucleotide"
  source: /note="Antisense strand to SEQ ID NO: 4257"
aaccacaagacagacuugc

SEQ ID NO: 4259 - RNA, 19 nt, Artificial Sequence
  source: /note="Description of Artificial Sequence: Synthetic oligonucleotide"
  source: /note="Sense strand starting at position 2044 of SEQ ID NO: 2218"
ggcuaccucucuuagaaua

SEQ ID NO: 4260 - RNA, 19 nt, Artificial Sequence
  source: /note="Description of Artificial Sequence: Synthetic oligonucleotide"
  source: /note="Antisense strand to SEQ ID NO: 4259"
uauucuaagagagguagcc

SEQ ID NO: 4261 - RNA, 19 nt, Artificial Sequence
  source: /note="Description of Artificial Sequence: Synthetic oligonucleotide"
  source: /note="Sense strand starting at position 2044 of SEQ ID NO: 2617"
uuaggauucucaggcacau

SEQ ID NO: 4262 - RNA, 19 nt, Artificial Sequence
  source: /note="Description of Artificial Sequence: Synthetic oligonucleotide"
  source: /note="Antisense strand to SEQ ID NO: 4261"
augugccugagaauccuaa

SEQ ID NO: 4263 - RNA, 19 nt, Artificial Sequence
  source: /note="Description of Artificial Sequence: Synthetic oligonucleotide"
  source: /note="Sense strand starting at position 2044 of SEQ ID NO: 2685"
ggguaagaguagucugcac

SEQ ID NO: 4264 - RNA, 19 nt, Artificial Sequence
  source: /note="Description of Artificial Sequence: Synthetic oligonucleotide"
  source: /note="Antisense strand to SEQ ID NO: 4263"
gugcagacuacucuuaccc

SEQ ID NO: 4265 - RNA, 19 nt, Artificial Sequence
  source: /note="Description of Artificial Sequence: Synthetic oligonucleotide"
  source: /note="Sense strand starting at position 2044 of SEQ ID NO: 2687"
guaagaguagucugcacuu

SEQ ID NO: 4266 - RNA, 19 nt, Artificial Sequence
  source: /note="Description of Artificial Sequence: Synthetic oligonucleotide"
  source: /note="Antisense strand to SEQ ID NO: 4265"
aagugcagacuacucuuac

SEQ ID NO: 4267 - RNA, 19 nt, Artificial Sequence
  source: /note="Description of Artificial Sequence: Synthetic oligonucleotide"
  source: /note="Sense strand starting at position 2044 of SEQ ID NO: 2693"
guagucugcacuugcugaa

SEQ ID NO: 4268 - RNA, 19 nt, Artificial Sequence
  source: /note="Description of Artificial Sequence: Synthetic oligonucleotide"
  source: /note="Antisense strand to SEQ ID NO: 4267"
uucagcaagugcagacuac

SEQ ID NO: 4269 - RNA, 19 nt, Artificial Sequence
  source: /note="Description of Artificial Sequence: Synthetic oligonucleotide"
  source: /note="Sense strand starting at position 2044 of SEQ ID NO: 2706"
gcugaaagcuucuuauaug

SEQ ID NO: 4270 - RNA, 19 nt, Artificial Sequence
  source: /note="Description of Artificial Sequence: Synthetic oligonucleotide"
  source: /note="Antisense strand to SEQ ID NO: 4269"
cauauaagaagcuuucagc

SEQ ID NO: 4271 - RNA, 19 nt, Artificial Sequence
  source: /note="Description of Artificial Sequence: Synthetic oligonucleotide"
  source: /note="Sense strand starting at position 2044 of SEQ ID NO: 2707"
cugaaagcuucuuauaugc

SEQ ID NO: 4272 - RNA, 19 nt, Artificial Sequence
  source: /note="Description of Artificial Sequence: Synthetic oligonucleotide"
  source: /note="Antisense strand to SEQ ID NO: 4271"
gcauauaagaagcuuucag

SEQ ID NO: 4273 - RNA, 19 nt, Artificial Sequence
  source: /note="Description of Artificial Sequence: Synthetic oligonucleotide"
  source: /note="Sense strand starting at position 2044 of SEQ ID NO: 2717"
cuuauaugcuagucaggua

SEQ ID NO: 4274 - RNA, 19 nt, Artificial Sequence
  source: /note="Description of Artificial Sequence: Synthetic oligonucleotide"
  source: /note="Antisense strand to SEQ ID NO: 4273"
uaccugacuagcauauaag

SEQ ID NO: 4275 - RNA, 19 nt, Artificial Sequence
  source: /note="Description of Artificial Sequence: Synthetic oligonucleotide"
  source: /note="Sense strand starting at position 2044 of SEQ ID NO: 2932"
guggcuggagucuaaaguu

SEQ ID NO: 4276 - RNA, 19 nt, Artificial Sequence
  source: /note="Description of Artificial Sequence: Synthetic oligonucleotide"
  source: /note="Antisense strand to SEQ ID NO: 4275"
aacuuuagacuccagccac

SEQ ID NO: 4277 - RNA, 19 nt, Artificial Sequence
  source: /note="Description of Artificial Sequence: Synthetic oligonucleotide"
  source: /note="Sense strand starting at position 2044 of SEQ ID NO: 3072"
uuaguaguguugucuugga

SEQ ID NO: 4278 - RNA, 19 nt, Artificial Sequence
  source: /note="Description of Artificial Sequence: Synthetic oligonucleotide"
  source: /note="Antisense strand to SEQ ID NO: 4277"
uccaagacaacacuacuaa

SEQ ID NO: 4279 - RNA, 19 nt, Artificial Sequence
  source: /note="Description of Artificial Sequence: Synthetic oligonucleotide"
  source: /note="Sense strand starting at position 2044 of SEQ ID NO: 3077"
aguguugucuuggauuugu

SEQ ID NO: 4280 - RNA, 19 nt, Artificial Sequence
  source: /note="Description of Artificial Sequence: Synthetic oligonucleotide"
  source: /note="Antisense strand to SEQ ID NO: 4279"
acaaauccaagacaacacu

SEQ ID NO: 4281 - RNA, 19 nt, Artificial Sequence
  source: /note="Description of Artificial Sequence: Synthetic oligonucleotide"
  source: /note="Sense strand starting at position 2044 of SEQ ID NO: 3166"
ggcgaggaguguugcucua

SEQ ID NO: 4282 - RNA, 19 nt, Artificial Sequence
  source: /note="Description of Artificial Sequence: Synthetic oligonucleotide"
  source: /note="Antisense strand to SEQ ID NO: 4281"
uagagcaacacuccucgcc

SEQ ID NO: 4283 - RNA, 19 nt, Artificial Sequence
  source: /note="Description of Artificial Sequence: Synthetic oligonucleotide"
  source: /note="Sense strand starting at position 2044 of SEQ ID NO: 3371"
acucuauagucagggcaaa

SEQ ID NO: 4284 - RNA, 19 nt, Artificial Sequence
  source: /note="Description of Artificial Sequence: Synthetic oligonucleotide"
  source: /note="Antisense strand to SEQ ID NO: 4283"
uuugcccugacuauagagu

SEQ ID NO: 4285 - RNA, 19 nt, Artificial Sequence
  source: /note="Description of Artificial Sequence: Synthetic oligonucleotide"
  source: /note="Sense strand starting at position 2044 of SEQ ID NO: 3470"
gagcuuaaguagccaugga

SEQ ID NO: 4286 - RNA, 19 nt, Artificial Sequence
  source: /note="Description of Artificial Sequence: Synthetic oligonucleotide"
  source: /note="Antisense strand to SEQ ID NO: 4285"
uccauggcuacuuaagcuc

SEQ ID NO: 4287 - RNA, 19 nt, Artificial Sequence
  source: /note="Description of Artificial Sequence: Synthetic oligonucleotide"
  source: /note="Sense strand starting at position 2044 of SEQ ID NO: 3504"
uuuccaguguucugcuagu

SEQ ID NO: 4288 - RNA, 19 nt, Artificial Sequence
  source: /note="Description of Artificial Sequence: Synthetic oligonucleotide"
  source: /note="Antisense strand to SEQ ID NO: 4287"
acuagcagaacacuggaaa

SEQ ID NO: 4289 - RNA, 19 nt, Artificial Sequence
  source: /note="Description of Artificial Sequence: Synthetic oligonucleotide"
  source: /note="Sense strand starting at position 2044 of SEQ ID NO: 3686"
ggaugucccugcuguguga

SEQ ID NO: 4290 - RNA, 19 nt, Artificial Sequence
  source: /note="Description of Artificial Sequence: Synthetic oligonucleotide"
  source: /note="Antisense strand to SEQ ID NO: 4289"
ucacacagcagggacaucc

SEQ ID NO: 4291 - RNA, 19 nt, Artificial Sequence
  source: /note="Description of Artificial Sequence: Synthetic oligonucleotide"
  source: /note="Sense strand starting at position 2044 of SEQ ID NO: 3765"
guagaaaccuaagaaucag

SEQ ID NO: 4292 - RNA, 19 nt, Artificial Sequence
  source: /note="Description of Artificial Sequence: Synthetic oligonucleotide"
  source: /note="Antisense strand to SEQ ID NO: 4291"
cugauucuuagguuucuac

SEQ ID NO: 4293 - RNA, 19 nt, Artificial Sequence
  source: /note="Description of Artificial Sequence: Synthetic oligonucleotide"
  source: /note="Sense strand starting at position 2044 of SEQ ID NO: 3791"
gaaagagccugcuagaaac

SEQ ID NO: 4294 - RNA, 19 nt, Artificial Sequence
  source: /note="Description of Artificial Sequence: Synthetic oligonucleotide"
  source: /note="Antisense strand to SEQ ID NO: 4293"
guuucuagcaggcucuuuc

SEQ ID NO: 4295 - RNA, 19 nt, Artificial Sequence
  source: /note="Description of Artificial Sequence: Synthetic oligonucleotide"
  source: /note="Sense strand starting at position 2044 of SEQ ID NO: 3801"
gcuagaaacuaguauggag

SEQ ID NO: 4296 - RNA, 19 nt, Artificial Sequence
  source: /note="Description of Artificial Sequence: Synthetic oligonucleotide"
  source: /note="Antisense strand to SEQ ID NO: 4295"
cuccauacuaguuucuagc

SEQ ID NO: 4297 - RNA, 19 nt, Artificial Sequence
  source: /note="Description of Artificial Sequence: Synthetic oligonucleotide"
  source: /note="Sense strand starting at position 2044 of SEQ ID NO: 3816"
ggagcuaacucagaacuua

SEQ ID NO: 4298 - RNA, 19 nt, Artificial Sequence
  source: /note="Description of Artificial Sequence: Synthetic oligonucleotide"
  source: /note="Antisense strand to SEQ ID NO: 4297"
uaaguucugaguuagcucc

SEQ ID NO: 4299 - RNA, 19 nt, Artificial Sequence
  source: /note="Description of Artificial Sequence: Synthetic oligonucleotide"
  source: /note="Sense strand starting at position 2044 of SEQ ID NO: 3830"
acuuacugguccugccaga

SEQ ID NO: 4300 - RNA, 19 nt, Artificial Sequence
  source: /note="Description of Artificial Sequence: Synthetic oligonucleotide"
  source: /note="Antisense strand to SEQ ID NO: 4299"
ucuggcaggaccaguaagu

SEQ ID NO: 4301 - RNA, 19 nt, Artificial Sequence
  source: /note="Description of Artificial Sequence: Synthetic oligonucleotide"
  source: /note="Sense strand starting at position 2044 of SEQ ID NO: 3858"
gcuuaaggguucugucuga

SEQ ID NO: 4302 - RNA, 19 nt, Artificial Sequence
  source: /note="Description of Artificial Sequence: Synthetic oligonucleotide"
  source: /note="Antisense strand to SEQ ID NO: 4301"
ucagacagaacccuuaagc

SEQ ID NO: 4303 - RNA, 19 nt, Artificial Sequence
  source: /note="Description of Artificial Sequence: Synthetic oligonucleotide"
  source: /note="Sense strand starting at position 2044 of SEQ ID NO: 3862"
aaggguucugucugaguuc

SEQ ID NO: 4304 - RNA, 19 nt, Artificial Sequence
  source: /note="Description of Artificial Sequence: Synthetic oligonucleotide"
  source: /note="Antisense strand to SEQ ID NO: 4303"
gaacucagacagaacccuu

SEQ ID NO: 4305 - RNA, 19 nt, Artificial Sequence
  source: /note="Description of Artificial Sequence: Synthetic oligonucleotide"
  source: /note="Sense strand starting at position 2044 of SEQ ID NO: 3875"
gaguucugcugccaggaag

SEQ ID NO: 4306 - RNA, 19 nt, Artificial Sequence
  source: /note="Description of Artificial Sequence: Synthetic oligonucleotide"
  source: /note="Antisense strand to SEQ ID NO: 4305"
cuuccuggcagcagaacuc

SEQ ID NO: 4307 - RNA, 19 nt, Artificial Sequence
  source: /note="Description of Artificial Sequence: Synthetic oligonucleotide"
  source: /note="Sense strand starting at position 2044 of SEQ ID NO: 3967"
cugggcugugucuguguua

SEQ ID NO: 4308 - RNA, 19 nt, Artificial Sequence
  source: /note="Description of Artificial Sequence: Synthetic oligonucleotide"
  source: /note="Antisense strand to SEQ ID NO: 4307"
uaacacagacacagcccag

SEQ ID NO: 4309 - RNA, 19 nt, Artificial Sequence
  source: /note="Description of Artificial Sequence: Synthetic oligonucleotide"
  source: /note="Sense strand starting at position 2046 of SEQ ID NO: 328"
ucagucaugugucacuguu

SEQ ID NO: 4310 - RNA, 19 nt, Artificial Sequence
  source: /note="Description of Artificial Sequence: Synthetic oligonucleotide"
  source: /note="Antisense strand to SEQ ID NO: 4309"
aacagugacacaugacuga

SEQ ID NO: 4311 - RNA, 19 nt, Artificial Sequence
  source: /note="Description of Artificial Sequence: Synthetic oligonucleotide"
  source: /note="Sense strand starting at position 2046 of SEQ ID NO: 336"
gugucacuguucuuagcaa

SEQ ID NO: 4312 - RNA, 19 nt, Artificial Sequence
  source: /note="Description of Artificial Sequence: Synthetic oligonucleotide"
  source: /note="Antisense strand to SEQ ID NO: 4311"
uugcuaagaacagugacac

SEQ ID NO: 4313 - RNA, 19 nt, Artificial Sequence
  source: /note="Description of Artificial Sequence: Synthetic oligonucleotide"
  source: /note="Sense strand starting at position 2046 of SEQ ID NO: 337"
ugucacuguucuuagcaaa

SEQ ID NO: 4314 - RNA, 19 nt, Artificial Sequence
  source: /note="Description of Artificial Sequence: Synthetic oligonucleotide"
  source: /note="Antisense strand to SEQ ID NO: 4313"
uuugcuaagaacagugaca

SEQ ID NO: 4315 - RNA, 19 nt, Artificial Sequence
  source: /note="Description of Artificial Sequence: Synthetic oligonucleotide"
  source: /note="Sense strand starting at position 2046 of SEQ ID NO: 463"
agcaacauaucggagcauu

SEQ ID NO: 4316 - RNA, 19 nt, Artificial Sequence
  source: /note="Description of Artificial Sequence: Synthetic oligonucleotide"
  source: /note="Antisense strand to SEQ ID NO: 4315"
aaugcuccgauauguugcu

SEQ ID NO: 4317 - RNA, 19 nt, Artificial Sequence
  source: /note="Description of Artificial Sequence: Synthetic oligonucleotide"
  source: /note="Sense strand starting at position 2046 of SEQ ID NO: 591"
aagccuaguuuagaggaaa

SEQ ID NO: 4318 - RNA, 19 nt, Artificial Sequence
  source: /note="Description of Artificial Sequence: Synthetic oligonucleotide"
  source: /note="Antisense strand to SEQ ID NO: 4317"
uuuccucuaaacuaggcuu

SEQ ID NO: 4319 - RNA, 19 nt, Artificial Sequence
  source: /note="Description of Artificial Sequence: Synthetic oligonucleotide"
  source: /note="Sense strand starting at position 2046 of SEQ ID NO: 680"
aguguuguguccucagcag

SEQ ID NO: 4320 - RNA, 19 nt, Artificial Sequence
  source: /note="Description of Artificial Sequence: Synthetic oligonucleotide"
  source: /note="Antisense strand to SEQ ID NO: 4319"
cugcugaggacacaacacu

SEQ ID NO: 4321 - RNA, 19 nt, Artificial Sequence
  source: /note="Description of Artificial Sequence: Synthetic oligonucleotide"
  source: /note="Sense strand starting at position 2046 of SEQ ID NO: 694"
agcagucugguguguagaa

SEQ ID NO: 4322 - RNA, 19 nt, Artificial Sequence
  source: /note="Description of Artificial Sequence: Synthetic oligonucleotide"
  source: /note="Antisense strand to SEQ ID NO: 4321"
uucuacacaccagacugcu

SEQ ID NO: 4323 - RNA, 19 nt, Artificial Sequence
  source: /note="Description of Artificial Sequence: Synthetic oligonucleotide"
  source: /note="Sense strand starting at position 2046 of SEQ ID NO: 784"
uggccaaguugcuuaaguu

SEQ ID NO: 4324 - RNA, 19 nt, Artificial Sequence
  source: /note="Description of Artificial Sequence: Synthetic oligonucleotide"
  source: /note="Antisense strand to SEQ ID NO: 4323"
aacuuaagcaacuuggcca

SEQ ID NO: 4325 - RNA, 19 nt, Artificial Sequence
  source: /note="Description of Artificial Sequence: Synthetic oligonucleotide"
  source: /note="Sense strand starting at position 2046 of SEQ ID NO: 785"
ggccaaguugcuuaaguuc

SEQ ID NO: 4326 - RNA, 19 nt, Artificial Sequence
  source: /note="Description of Artificial Sequence: Synthetic oligonucleotide"
  source: /note="Antisense strand to SEQ ID NO: 4325"
gaacuuaagcaacuuggcc

SEQ ID NO: 4327 - RNA, 19 nt, Artificial Sequence
  source: /note="Description of Artificial Sequence: Synthetic oligonucleotide"
  source: /note="Sense strand starting at position 2046 of SEQ ID NO: 829"
aucaaugacuuuggauaau

SEQ ID NO: 4328 - RNA, 19 nt, Artificial Sequence
  source: /note="Description of Artificial Sequence: Synthetic oligonucleotide"
  source: /note="Antisense strand to SEQ ID NO: 4327"
auuauccaaagucauugau

SEQ ID NO: 4329 - RNA, 19 nt, Artificial Sequence
  source: /note="Description of Artificial Sequence: Synthetic oligonucleotide"
  source: /note="Sense strand starting at position 2046 of SEQ ID NO: 876"
ugugaaauauauggagaua

SEQ ID NO: 4330 - RNA, 19 nt, Artificial Sequence
  source: /note="Description of Artificial Sequence: Synthetic oligonucleotide"
  source: /note="Antisense strand to SEQ ID NO: 4329"
uaucuccauauauuucaca

SEQ ID NO: 4331 - RNA, 19 nt, Artificial Sequence
  source: /note="Description of Artificial Sequence: Synthetic oligonucleotide"
  source: /note="Sense strand starting at position 2046 of SEQ ID NO: 966"
agcaauacaugucaagaag

SEQ ID NO: 4332 - RNA, 19 nt, Artificial Sequence
  source: /note="Description of Artificial Sequence: Synthetic oligonucleotide"
  source: /note="Antisense strand to SEQ ID NO: 4331"
cuucuugacauguauugcu

SEQ ID NO: 4333 - RNA, 19 nt, Artificial Sequence
  source: /note="Description of Artificial Sequence: Synthetic oligonucleotide"
  source: /note="Sense strand starting at position 2046 of SEQ ID NO: 1169"
gaccuaagcuguucuguua

SEQ ID NO: 4334 - RNA, 19 nt, Artificial Sequence
  source: /note="Description of Artificial Sequence: Synthetic oligonucleotide"
  source: /note="Antisense strand to SEQ ID NO: 4333"
uaacagaacagcuuagguc

SEQ ID NO: 4335 - RNA, 19 nt, Artificial Sequence
  source: /note="Description of Artificial Sequence: Synthetic oligonucleotide"
  source: /note="Sense strand starting at position 2046 of SEQ ID NO: 1188"
gucucugucucccaguaau

SEQ ID NO: 4336 - RNA, 19 nt, Artificial Sequence
  source: /note="Description of Artificial Sequence: Synthetic oligonucleotide"
  source: /note="Antisense strand to SEQ ID NO: 4335"
auuacugggagacagagac

SEQ ID NO: 4337 - RNA, 19 nt, Artificial Sequence
  source: /note="Description of Artificial Sequence: Synthetic oligonucleotide"
  source: /note="Sense strand starting at position 2046 of SEQ ID NO: 1202"
guaauuuggucuugggacu

SEQ ID NO: 4338 - RNA, 19 nt, Artificial Sequence
  source: /note="Description of Artificial Sequence: Synthetic oligonucleotide"
  source: /note="Antisense strand to SEQ ID NO: 4337"
agucccaagaccaaauuac

SEQ ID NO: 4339 - RNA, 19 nt, Artificial Sequence
  source: /note="Description of Artificial Sequence: Synthetic oligonucleotide"
  source: /note="Sense strand starting at position 2046 of SEQ ID NO: 1238"
cuuggcuggucccuugaau

SEQ ID NO: 4340 - RNA, 19 nt, Artificial Sequence
  source: /note="Description of Artificial Sequence: Synthetic oligonucleotide"
  source: /note="Antisense strand to SEQ ID NO: 4339"
auucaagggaccagccaag

SEQ ID NO: 4341 - RNA, 19 nt, Artificial Sequence
  source: /note="Description of Artificial Sequence: Synthetic oligonucleotide"
  source: /note="Sense strand starting at position 2046 of SEQ ID NO: 1270"
ccucuagagcugugcaguu

SEQ ID NO: 4342 - RNA, 19 nt, Artificial Sequence
  source: /note="Description of Artificial Sequence: Synthetic oligonucleotide"
  source: /note="Antisense strand to SEQ ID NO: 4341"
aacugcacagcucuagagg

SEQ ID NO: 4343 - RNA, 19 nt, Artificial Sequence
  source: /note="Description of Artificial Sequence: Synthetic oligonucleotide"
  source: /note="Sense strand starting at position 2046 of SEQ ID NO: 1286"
guugcaguccucugcaaac

SEQ ID NO: 4344 - RNA, 19 nt, Artificial Sequence
  source: /note="Description of Artificial Sequence: Synthetic oligonucleotide"
  source: /note="Antisense strand to SEQ ID NO: 4343"
guuugcagaggacugcaac

SEQ ID NO: 4345 - RNA, 19 nt, Artificial Sequence
  source: /note="Description of Artificial Sequence: Synthetic oligonucleotide"
  source: /note="Sense strand starting at position 2046 of SEQ ID NO: 1318"
agagaaagcugccaagaaa

SEQ ID NO: 4346 - RNA, 19 nt, Artificial Sequence
  source: /note="Description of Artificial Sequence: Synthetic oligonucleotide"
  source: /note="Antisense strand to SEQ ID NO: 4345"
uuucuuggcagcuuucucu

SEQ ID NO: 4347 - RNA, 19 nt, Artificial Sequence
  source: /note="Description of Artificial Sequence: Synthetic oligonucleotide"
  source: /note="Sense strand starting at position 2046 of SEQ ID NO: 1348"
gugacuacguggccucaga

SEQ ID NO: 4348 - RNA, 19 nt, Artificial Sequence
  source: /note="Description of Artificial Sequence: Synthetic oligonucleotide"
  source: /note="Antisense strand to SEQ ID NO: 4347"
ucugaggccacguagucac

SEQ ID NO: 4349 - RNA, 19 nt, Artificial Sequence
  source: /note="Description of Artificial Sequence: Synthetic oligonucleotide"
  source: /note="Sense strand starting at position 2046 of SEQ ID NO: 1373"
gaagcugaguucuggcuuu

SEQ ID NO: 4350 - RNA, 19 nt, Artificial Sequence
  source: /note="Description of Artificial Sequence: Synthetic oligonucleotide"
  source: /note="Antisense strand to SEQ ID NO: 4349"
aaagccagaacucagcuuc

SEQ ID NO: 4351 - RNA, 19 nt, Artificial Sequence
  source: /note="Description of Artificial Sequence: Synthetic oligonucleotide"
  source: /note="Sense strand starting at position 2046 of SEQ ID NO: 1448"
cauggauauucugagacac

SEQ ID NO: 4352 - RNA, 19 nt, Artificial Sequence
  source: /note="Description of Artificial Sequence: Synthetic oligonucleotide"
  source: /note="Antisense strand to SEQ ID NO: 4351"
gugucucagaauauccaug

SEQ ID NO: 4353 - RNA, 19 nt, Artificial Sequence
  source: /note="Description of Artificial Sequence: Synthetic oligonucleotide"
  source: /note="Sense strand starting at position 2046 of SEQ ID NO: 1468"
ccaggcuccuuacaguaaa

SEQ ID NO: 4354 - RNA, 19 nt, Artificial Sequence
  source: /note="Description of Artificial Sequence: Synthetic oligonucleotide"
  source: /note="Antisense strand to SEQ ID NO: 4353"
uuuacuguaaggagccugg

SEQ ID NO: 4355 - RNA, 19 nt, Artificial Sequence
  source: /note="Description of Artificial Sequence: Synthetic oligonucleotide"
  source: /note="Sense strand starting at position 2046 of SEQ ID NO: 1540"
ggugaagacucuuguugug

SEQ ID NO: 4356 - RNA, 19 nt, Artificial Sequence
  source: /note="Description of Artificial Sequence: Synthetic oligonucleotide"
  source: /note="Antisense strand to SEQ ID NO: 4355"
cacaacaagagucuucacc

SEQ ID NO: 4357 - RNA, 19 nt, Artificial Sequence
  source: /note="Description of Artificial Sequence: Synthetic oligonucleotide"
  source: /note="Sense strand starting at position 2046 of SEQ ID NO: 1603"
guaugcagauaugguuuau

SEQ ID NO: 4358 - RNA, 19 nt, Artificial Sequence
  source: /note="Description of Artificial Sequence: Synthetic oligonucleotide"
  source: /note="Antisense strand to SEQ ID NO: 4357"
auaaaccauaucugcauac

SEQ ID NO: 4359 - RNA, 19 nt, Artificial Sequence
  source: /note="Description of Artificial Sequence: Synthetic oligonucleotide"
  source: /note="Sense strand starting at position 2046 of SEQ ID NO: 1704"
ccagcagucuggcaauaag

SEQ ID NO: 4360 - RNA, 19 nt, Artificial Sequence
  source: /note="Description of Artificial Sequence: Synthetic oligonucleotide"
  source: /note="Antisense strand to SEQ ID NO: 4359"
cuuauugccagacugcugg

SEQ ID NO: 4361 - RNA, 19 nt, Artificial Sequence
  source: /note="Description of Artificial Sequence: Synthetic oligonucleotide"
  source: /note="Sense strand starting at position 2046 of SEQ ID NO: 1780"
cuuccagagucuugaaaua

SEQ ID NO: 4362 - RNA, 19 nt, Artificial Sequence
  source: /note="Description of Artificial Sequence: Synthetic oligonucleotide"
  source: /note="Antisense strand to SEQ ID NO: 4361"
uauuucaagacucuggaag

SEQ ID NO: 4363 - RNA, 19 nt, Artificial Sequence
  source: /note="Description of Artificial Sequence: Synthetic oligonucleotide"
  source: /note="Sense strand starting at position 2046 of SEQ ID NO: 1801"
cuggauaucucugguccca

SEQ ID NO: 4364 - RNA, 19 nt, Artificial Sequence
  source: /note="Description of Artificial Sequence: Synthetic oligonucleotide"
  source: /note="Antisense strand to SEQ ID NO: 4363"
ugggaccagagauauccag

SEQ ID NO: 4365 - RNA, 19 nt, Artificial Sequence
  source: /note="Description of Artificial Sequence: Synthetic oligonucleotide"
  source: /note="Sense strand starting at position 2046 of SEQ ID NO: 1806"
uaucucuggucccagagaa

SEQ ID NO: 4366 - RNA, 19 nt, Artificial Sequence
  source: /note="Description of Artificial Sequence: Synthetic oligonucleotide"
  source: /note="Antisense strand to SEQ ID NO: 4365"
uucucugggaccagagaua

SEQ ID NO: 4367 - RNA, 19 nt, Artificial Sequence
  source: /note="Description of Artificial Sequence: Synthetic oligonucleotide"
  source: /note="Sense strand starting at position 2046 of SEQ ID NO: 1839"
gggucccuauagcagaaau

SEQ ID NO: 4368 - RNA, 19 nt, Artificial Sequence
  source: /note="Description of Artificial Sequence: Synthetic oligonucleotide"
  source: /note="Antisense strand to SEQ ID NO: 4367"
auuucugcuauagggaccc

SEQ ID NO: 4369 - RNA, 19 nt, Artificial Sequence
  source: /note="Description of Artificial Sequence: Synthetic oligonucleotide"
  source: /note="Sense strand starting at position 2046 of SEQ ID NO: 2164"
gccuguauugugugggaga

SEQ ID NO: 4370 - RNA, 19 nt, Artificial Sequence
  source: /note="Description of Artificial Sequence: Synthetic oligonucleotide"
  source: /note="Antisense strand to SEQ ID NO: 4369"
ucucccacacaauacaggc

SEQ ID NO: 4371 - RNA, 19 nt, Artificial Sequence
  source: /note="Description of Artificial Sequence: Synthetic oligonucleotide"
  source: /note="Sense strand starting at position 2046 of SEQ ID NO: 2165"
ccuguauugugugggagag

SEQ ID NO: 4372 - RNA, 19 nt, Artificial Sequence
  source: /note="Description of Artificial Sequence: Synthetic oligonucleotide"
  source: /note="Antisense strand to SEQ ID NO: 4371"
cucucccacacaauacagg

SEQ ID NO: 4373 - RNA, 19 nt, Artificial Sequence
  source: /note="Description of Artificial Sequence: Synthetic oligonucleotide"
  source: /note="Sense strand starting at position 2046 of SEQ ID NO: 2189"
ggaggacagugguguuucu

SEQ ID NO: 4374 - RNA, 19 nt, Artificial Sequence
  source: /note="Description of Artificial Sequence: Synthetic oligonucleotide"
  source: /note="Antisense strand to SEQ ID NO: 4373"
agaaacaccacuguccucc

SEQ ID NO: 4375 - RNA, 19 nt, Artificial Sequence
  source: /note="Description of Artificial Sequence: Synthetic oligonucleotide"
  source: /note="Sense strand starting at position 2046 of SEQ ID NO: 2386"
uuauuagcgucacaggaaa

SEQ ID NO: 4376 - RNA, 19 nt, Artificial Sequence
  source: /note="Description of Artificial Sequence: Synthetic oligonucleotide"
  source: /note="Antisense strand to SEQ ID NO: 4375"
uuuccugugacgcuaauaa

SEQ ID NO: 4377 - RNA, 19 nt, Artificial Sequence
  source: /note="Description of Artificial Sequence: Synthetic oligonucleotide"
  source: /note="Sense strand starting at position 2046 of SEQ ID NO: 2454"
uuugcucuguccuugucau

SEQ ID NO: 4378 - RNA, 19 nt, Artificial Sequence
  source: /note="Description of Artificial Sequence: Synthetic oligonucleotide"
  source: /note="Antisense strand to SEQ ID NO: 4377"
augacaaggacagagcaaa

SEQ ID NO: 4379 - RNA, 19 nt, Artificial Sequence
  source: /note="Description of Artificial Sequence: Synthetic oligonucleotide"
  source: /note="Sense strand starting at position 2046 of SEQ ID NO: 2455"
uugcucuguccuugucauu

SEQ ID NO: 4380 - RNA, 19 nt, Artificial Sequence
  source: /note="Description of Artificial Sequence: Synthetic oligonucleotide"
  source: /note="Antisense strand to SEQ ID NO: 4379"
aaugacaaggacagagcaa

SEQ ID NO: 4381 - RNA, 19 nt, Artificial Sequence
  source: /note="Description of Artificial Sequence: Synthetic oligonucleotide"
  source: /note="Sense strand starting at position 2046 of SEQ ID NO: 2647"
gcacuaugaucgcaccuau

SEQ ID NO: 4382 - RNA, 19 nt, Artificial Sequence
  source: /note="Description of Artificial Sequence: Synthetic oligonucleotide"
  source: /note="Antisense strand to SEQ ID NO: 4381"
auaggugcgaucauagugc

SEQ ID NO: 4383 - RNA, 19 nt, Artificial Sequence
  source: /note="Description of Artificial Sequence: Synthetic oligonucleotide"
  source: /note="Sense strand starting at position 2046 of SEQ ID NO: 2654"
gaucgcaccuaugaaugaa

SEQ ID NO: 4384 - RNA, 19 nt, Artificial Sequence
  source: /note="Description of Artificial Sequence: Synthetic oligonucleotide"
  source: /note="Antisense strand to SEQ ID NO: 4383"
uucauucauaggugcgauc

SEQ ID NO: 4385 - RNA, 19 nt, Artificial Sequence
  source: /note="Description of Artificial Sequence: Synthetic oligonucleotide"
  source: /note="Sense strand starting at position 2046 of SEQ ID NO: 2846"
ugggcucucugagaaagga

SEQ ID NO: 4386 - RNA, 19 nt, Artificial Sequence
  source: /note="Description of Artificial Sequence: Synthetic oligonucleotide"
  source: /note="Antisense strand to SEQ ID NO: 4385"
uccuuucucagagagccca

SEQ ID NO: 4387 - RNA, 19 nt, Artificial Sequence
  source: /note="Description of Artificial Sequence: Synthetic oligonucleotide"
  source: /note="Sense strand starting at position 2046 of SEQ ID NO: 2877"
aggucuguggccugugagu

SEQ ID NO: 4388 - RNA, 19 nt, Artificial Sequence
  source: /note="Description of Artificial Sequence: Synthetic oligonucleotide"
  source: /note="Antisense strand to SEQ ID NO: 4387"
acucacaggccacagaccu

SEQ ID NO: 4389 - RNA, 19 nt, Artificial Sequence
  source: /note="Description of Artificial Sequence: Synthetic oligonucleotide"
  source: /note="Sense strand starting at position 2046 of SEQ ID NO: 2879"
gucuguggccugugaguca

SEQ ID NO: 4390 - RNA, 19 nt, Artificial Sequence
  source: /note="Description of Artificial Sequence: Synthetic oligonucleotide"
  source: /note="Antisense strand to SEQ ID NO: 4389"
ugacucacaggccacagac

SEQ ID NO: 4391 - RNA, 19 nt, Artificial Sequence
  source: /note="Description of Artificial Sequence: Synthetic oligonucleotide"
  source: /note="Sense strand starting at position 2046 of SEQ ID NO: 2950"
gggauuagguuggaugaca

SEQ ID NO: 4392 - RNA, 19 nt, Artificial Sequence
  source: /note="Description of Artificial Sequence: Synthetic oligonucleotide"
  source: /note="Antisense strand to SEQ ID NO: 4391"
ugucauccaaccuaauccc

SEQ ID NO: 4393 - RNA, 19 nt, Artificial Sequence
  source: /note="Description of Artificial Sequence: Synthetic oligonucleotide"
  source: /note="Sense strand starting at position 2046 of SEQ ID NO: 2955"
uagguuggaugacaucuaa

SEQ ID NO: 4394 - RNA, 19 nt, Artificial Sequence
  source: /note="Description of Artificial Sequence: Synthetic oligonucleotide"
  source: /note="Antisense strand to SEQ ID NO: 4393"
uuagaugucauccaaccua

SEQ ID NO: 4395 - RNA, 19 nt, Artificial Sequence
  source: /note="Description of Artificial Sequence: Synthetic oligonucleotide"
  source: /note="Sense strand starting at position 2046 of SEQ ID NO: 3173"
accucuaggguuugugagu

SEQ ID NO: 4396 - RNA, 19 nt, Artificial Sequence
  source: /note="Description of Artificial Sequence: Synthetic oligonucleotide"
  source: /note="Antisense strand to SEQ ID NO: 4395"
acucacaaacccuagaggu

SEQ ID NO: 4397 - RNA, 19 nt, Artificial Sequence
  source: /note="Description of Artificial Sequence: Synthetic oligonucleotide"
  source: /note="Sense strand starting at position 2046 of SEQ ID NO: 3182"
guuugugagugauaagagu

SEQ ID NO: 4398 - RNA, 19 nt, Artificial Sequence
  source: /note="Description of Artificial Sequence: Synthetic oligonucleotide"
  source: /note="Antisense strand to SEQ ID NO: 4397"
acucuuaucacucacaaac

SEQ ID NO: 4399 - RNA, 19 nt, Artificial Sequence
  source: /note="Description of Artificial Sequence: Synthetic oligonucleotide"
  source: /note="Sense strand starting at position 2046 of SEQ ID NO: 3386"
aagcuacaguagcagaaau

SEQ ID NO: 4400 - RNA, 19 nt, Artificial Sequence
  source: /note="Description of Artificial Sequence: Synthetic oligonucleotide"
  source: /note="Antisense strand to SEQ ID NO: 4399"
auuucugcuacuguagcuu

SEQ ID NO: 4401 - RNA, 19 nt, Artificial Sequence
  source: /note="Description of Artificial Sequence: Synthetic oligonucleotide"
  source: /note="Sense strand starting at position 2046 of SEQ ID NO: 3501"
ccaugugucugcuuaggag

SEQ ID NO: 4402 - RNA, 19 nt, Artificial Sequence
  source: /note="Description of Artificial Sequence: Synthetic oligonucleotide"
  source: /note="Antisense strand to SEQ ID NO: 4401"
cuccuaagcagacacaugg

SEQ ID NO: 4403 - RNA, 19 nt, Artificial Sequence
  source: /note="Description of Artificial Sequence: Synthetic oligonucleotide"
  source: /note="Sense strand starting at position 2046 of SEQ ID NO: 3504"
ugugucugcuuaggaggau

SEQ ID NO: 4404 - RNA, 19 nt, Artificial Sequence
  source: /note="Description of Artificial Sequence: Synthetic oligonucleotide"
  source: /note="Antisense strand to SEQ ID NO: 4403"
auccuccuaagcagacaca

SEQ ID NO: 4405 - RNA, 19 nt, Artificial Sequence
  source: /note="Description of Artificial Sequence: Synthetic oligonucleotide"
  source: /note="Sense strand starting at position 2046 of SEQ ID NO: 3568"
cuuccugccugagaauucu

SEQ ID NO: 4406 - RNA, 19 nt, Artificial Sequence
  source: /note="Description of Artificial Sequence: Synthetic oligonucleotide"
  source: /note="Antisense strand to SEQ ID NO: 4405"
agaauucucaggcaggaag

SEQ ID NO: 4407 - RNA, 19 nt, Artificial Sequence
  source: /note="Description of Artificial Sequence: Synthetic oligonucleotide"
  source: /note="Sense strand starting at position 2046 of SEQ ID NO: 3574"
gccugagaauucuacacca

SEQ ID NO: 4408 - RNA, 19 nt, Artificial Sequence
  source: /note="Description of Artificial Sequence: Synthetic oligonucleotide"
  source: /note="Antisense strand to SEQ ID NO: 4407"
ugguguagaauucucaggc

SEQ ID NO: 4409 - RNA, 19 nt, Artificial Sequence
  source: /note="Description of Artificial Sequence: Synthetic oligonucleotide"
  source: /note="Sense strand starting at position 2046 of SEQ ID NO: 3662"
uuuggcaaugauuguguca

SEQ ID NO: 4410 - RNA, 19 nt, Artificial Sequence
  source: /note="Description of Artificial Sequence: Synthetic oligonucleotide"
  source: /note="Antisense strand to SEQ ID NO: 4409"
ugacacaaucauugccaaa

SEQ ID NO: 4411 - RNA, 19 nt, Artificial Sequence
  source: /note="Description of Artificial Sequence: Synthetic oligonucleotide"
  source: /note="Sense strand starting at position 2046 of SEQ ID NO: 3664"
uggcaaugauugugucacu

SEQ ID NO: 4412 - RNA, 19 nt, Artificial Sequence
  source: /note="Description of Artificial Sequence: Synthetic oligonucleotide"
  source: /note="Antisense strand to SEQ ID NO: 4411"
agugacacaaucauugcca

SEQ ID NO: 4413 - RNA, 19 nt, Artificial Sequence
  source: /note="Description of Artificial Sequence: Synthetic oligonucleotide"
  source: /note="Sense strand starting at position 2046 of SEQ ID NO: 3667"
caaugauugugucacuaug

SEQ ID NO: 4414 - RNA, 19 nt, Artificial Sequence
  source: /note="Description of Artificial Sequence: Synthetic oligonucleotide"
  source: /note="Antisense strand to SEQ ID NO: 4413"
cauagugacacaaucauug

SEQ ID NO: 4415 - RNA, 19 nt, Artificial Sequence
  source: /note="Description of Artificial Sequence: Synthetic oligonucleotide"
  source: /note="Sense strand starting at position 2046 of SEQ ID NO: 3746"
gcagcaaagucucuacacu

SEQ ID NO: 4416 - RNA, 19 nt, Artificial Sequence
  source: /note="Description of Artificial Sequence: Synthetic oligonucleotide"
  source: /note="Antisense strand to SEQ ID NO: 4415"
aguguagagacuuugcugc

SEQ ID NO: 4417 - RNA, 19 nt, Artificial Sequence
  source: /note="Description of Artificial Sequence: Synthetic oligonucleotide"
  source: /note="Sense strand starting at position 2046 of SEQ ID NO: 3819"
gguucuucuuccuccaagu

SEQ ID NO: 4418 - RNA, 19 nt, Artificial Sequence
  source: /note="Description of Artificial Sequence: Synthetic oligonucleotide"
  source: /note="Antisense strand to SEQ ID NO: 4417"
acuuggaggaagaagaacc

SEQ ID NO: 4419 - RNA, 19 nt, Artificial Sequence
  source: /note="Description of Artificial Sequence: Synthetic oligonucleotide"
  source: /note="Sense strand starting at position 2046 of SEQ ID NO: 3860"
gaggcuuugugauccgguu

SEQ ID NO: 4420 - RNA, 19 nt, Artificial Sequence
  source: /note="Description of Artificial Sequence: Synthetic oligonucleotide"
  source: /note="Antisense strand to SEQ ID NO: 4419"
aaccggaucacaaagccuc

SEQ ID NO: 4421 - RNA, 19 nt, Artificial Sequence
  source: /note="Description of Artificial Sequence: Synthetic oligonucleotide"
  source: /note="Sense strand starting at position 2045 of SEQ ID NO: 146"
gguggcaguaccuguaauu

SEQ ID NO: 4422 - RNA, 19 nt, Artificial Sequence
  source: /note="Description of Artificial Sequence: Synthetic oligonucleotide"
  source: /note="Antisense strand to SEQ ID NO: 4421"
aauuacagguacugccacc

SEQ ID NO: 4423 - RNA, 19 nt, Artificial Sequence
  source: /note="Description of Artificial Sequence: Synthetic oligonucleotide"
  source: /note="Sense strand starting at position 2045 of SEQ ID NO: 370"
guuuaaaugucuugguaaa

SEQ ID NO: 4424 - RNA, 19 nt, Artificial Sequence
  source: /note="Description of Artificial Sequence: Synthetic oligonucleotide"
  source: /note="Antisense strand to SEQ ID NO: 4423"
uuuaccaagacauuuaaac

SEQ ID NO: 4425 - RNA, 19 nt, Artificial Sequence
  source: /note="Description of Artificial Sequence: Synthetic oligonucleotide"
  source: /note="Sense strand starting at position 2045 of SEQ ID NO: 393"
ucuagaucauaaugauaug

SEQ ID NO: 4426 - RNA, 19 nt, Artificial Sequence
  source: /note="Description of Artificial Sequence: Synthetic oligonucleotide"
  source: /note="Antisense strand to SEQ ID NO: 4425"
cauaucauuaugaucuaga

SEQ ID NO: 4427 - RNA, 19 nt, Artificial Sequence
  source: /note="Description of Artificial Sequence: Synthetic oligonucleotide"
  source: /note="Sense strand starting at position 2045 of SEQ ID NO: 396"
agaucauaaugauaugugu

SEQ ID NO: 4428 - RNA, 19 nt, Artificial Sequence
  source: /note="Description of Artificial Sequence: Synthetic oligonucleotide"
  source: /note="Antisense strand to SEQ ID NO: 4427"
acacauaucauuaugaucu

SEQ ID NO: 4429 - RNA, 19 nt, Artificial Sequence
  source: /note="Description of Artificial Sequence: Synthetic oligonucleotide"
  source: /note="Sense strand starting at position 2045 of SEQ ID NO: 403"
aaugauaugugugaacuuc

SEQ ID NO: 4430 - RNA, 19 nt, Artificial Sequence
  source: /note="Description of Artificial Sequence: Synthetic oligonucleotide"
  source: /note="Antisense strand to SEQ ID NO: 4429"
gaaguucacacauaucauu

SEQ ID NO: 4431 - RNA, 19 nt, Artificial Sequence
  source: /note="Description of Artificial Sequence: Synthetic oligonucleotide"
  source: /note="Sense strand starting at position 2045 of SEQ ID NO: 411"
gugugaacuucuguauagc

SEQ ID NO: 4432 - RNA, 19 nt, Artificial Sequence
  source: /note="Description of Artificial Sequence: Synthetic oligonucleotide"
  source: /note="Antisense strand to SEQ ID NO: 4431"
gcuauacagaaguucacac

SEQ ID NO: 4433 - RNA, 19 nt, Artificial Sequence
  source: /note="Description of Artificial Sequence: Synthetic oligonucleotide"
  source: /note="Sense strand starting at position 2045 of SEQ ID NO: 560"
ggcucuccuuuauugugau

SEQ ID NO: 4434 - RNA, 19 nt, Artificial Sequence
  source: /note="Description of Artificial Sequence: Synthetic oligonucleotide"
  source: /note="Antisense strand to SEQ ID NO: 4433"
aucacaauaaaggagagcc

SEQ ID NO: 4435 - RNA, 19 nt, Artificial Sequence
  source: /note="Description of Artificial Sequence: Synthetic oligonucleotide"
  source: /note="Sense strand starting at position 2045 of SEQ ID NO: 561"
gcucuccuuuauugugaua

SEQ ID NO: 4436 - RNA, 19 nt, Artificial Sequence
  source: /note="Description of Artificial Sequence: Synthetic oligonucleotide"
  source: /note="Antisense strand to SEQ ID NO: 4435"
uaucacaauaaaggagagc

SEQ ID NO: 4437 - RNA, 19 nt, Artificial Sequence
  source: /note="Description of Artificial Sequence: Synthetic oligonucleotide"
  source: /note="Sense strand starting at position 2045 of SEQ ID NO: 563"
ucuccuuuauugugauauu

SEQ ID NO: 4438 - RNA, 19 nt, Artificial Sequence
  source: /note="Description of Artificial Sequence: Synthetic oligonucleotide"
  source: /note="Antisense strand to SEQ ID NO: 4437"
aauaucacaauaaaggaga

SEQ ID NO: 4439 - RNA, 19 nt, Artificial Sequence
  source: /note="Description of Artificial Sequence: Synthetic oligonucleotide"
  source: /note="Sense strand starting at position 2045 of SEQ ID NO: 631"
acauuacagugaugaagaa

SEQ ID NO: 4440 - RNA, 19 nt, Artificial Sequence
  source: /note="Description of Artificial Sequence: Synthetic oligonucleotide"
  source: /note="Antisense strand to SEQ ID NO: 4439"
uucuucaucacuguaaugu

SEQ ID NO: 4441 - RNA, 19 nt, Artificial Sequence
  source: /note="Description of Artificial Sequence: Synthetic oligonucleotide"
  source: /note="Sense strand starting at position 2045 of SEQ ID NO: 791"
aaccuagacuugugaggaa

SEQ ID NO: 4442 - RNA, 19 nt, Artificial Sequence
  source: /note="Description of Artificial Sequence: Synthetic oligonucleotide"
  source: /note="Antisense strand to SEQ ID NO: 4441"
uuccucacaagucuagguu

SEQ ID NO: 4443 - RNA, 19 nt, Artificial Sequence
  source: /note="Description of Artificial Sequence: Synthetic oligonucleotide"
  source: /note="Sense strand starting at position 2045 of SEQ ID NO: 850"
aagccaugcuguucugacu

SEQ ID NO: 4444 - RNA, 19 nt, Artificial Sequence
  source: /note="Description of Artificial Sequence: Synthetic oligonucleotide"
  source: /note="Antisense strand to SEQ ID NO: 4443"
agucagaacagcauggcuu

SEQ ID NO: 4445 - RNA, 19 nt, Artificial Sequence
  source: /note="Description of Artificial Sequence: Synthetic oligonucleotide"
  source: /note="Sense strand starting at position 2045 of SEQ ID NO: 1049"
ggugacacaucuuauguca

SEQ ID NO: 4446 - RNA, 19 nt, Artificial Sequence
  source: /note="Description of Artificial Sequence: Synthetic oligonucleotide"
  source: /note="Antisense strand to SEQ ID NO: 4445"
ugacauaagaugugucacc

SEQ ID NO: 4447 - RNA, 19 nt, Artificial Sequence
  source: /note="Description of Artificial Sequence: Synthetic oligonucleotide"
  source: /note="Sense strand starting at position 2045 of SEQ ID NO: 1069"
ugggcucugugguucaaau

SEQ ID NO: 4448 - RNA, 19 nt, Artificial Sequence
  source: /note="Description of Artificial Sequence: Synthetic oligonucleotide"
  source: /note="Antisense strand to SEQ ID NO: 4447"
auuugaaccacagagccca

SEQ ID NO: 4449 - RNA, 19 nt, Artificial Sequence
  source: /note="Description of Artificial Sequence: Synthetic oligonucleotide"
  source: /note="Sense strand starting at position 2045 of SEQ ID NO: 1071"
ggcucugugguucaaaugu

SEQ ID NO: 4450 - RNA, 19 nt, Artificial Sequence
  source: /note="Description of Artificial Sequence: Synthetic oligonucleotide"
  source: /note="Antisense strand to SEQ ID NO: 4449"
acauuugaaccacagagcc

SEQ ID NO: 4451 - RNA, 19 nt, Artificial Sequence
  source: /note="Description of Artificial Sequence: Synthetic oligonucleotide"
  source: /note="Sense strand starting at position 2045 of SEQ ID NO: 1119"
gagggauaguaauggaaag

SEQ ID NO: 4452 - RNA, 19 nt, Artificial Sequence
  source: /note="Description of Artificial Sequence: Synthetic oligonucleotide"
  source: /note="Antisense strand to SEQ ID NO: 4451"
cuuuccauuacuaucccuc

SEQ ID NO: 4453 - RNA, 19 nt, Artificial Sequence
  source: /note="Description of Artificial Sequence: Synthetic oligonucleotide"
  source: /note="Sense strand starting at position 2045 of SEQ ID NO: 1452"
ugacuuccuuugugaaacu

SEQ ID NO: 4454 - RNA, 19 nt, Artificial Sequence
  source: /note="Description of Artificial Sequence: Synthetic oligonucleotide"
  source: /note="Antisense strand to SEQ ID NO: 4453"
aguuucacaaaggaaguca

SEQ ID NO: 4455 - RNA, 19 nt, Artificial Sequence
  source: /note="Description of Artificial Sequence: Synthetic oligonucleotide"
  source: /note="Sense strand starting at position 2045 of SEQ ID NO: 1641"
cugggugucuuguauuugu

SEQ ID NO: 4456 - RNA, 19 nt, Artificial Sequence
  source: /note="Description of Artificial Sequence: Synthetic oligonucleotide"
  source: /note="Antisense strand to SEQ ID NO: 4455"
acaaauacaagacacccag

SEQ ID NO: 4457 - RNA, 19 nt, Artificial Sequence
  source: /note="Description of Artificial Sequence: Synthetic oligonucleotide"
  source: /note="Sense strand starting at position 2045 of SEQ ID NO: 1663"
ugcuaaaucuggccaugca

SEQ ID NO: 4458 - RNA, 19 nt, Artificial Sequence
  source: /note="Description of Artificial Sequence: Synthetic oligonucleotide"
  source: /note="Antisense strand to SEQ ID NO: 4457"
ugcauggccagauuuagca

SEQ ID NO: 4459 - RNA, 19 nt, Artificial Sequence
  source: /note="Description of Artificial Sequence: Synthetic oligonucleotide"
  source: /note="Sense strand starting at position 2045 of SEQ ID NO: 2201"
guuuccuucuucuauguca

SEQ ID NO: 4460 - RNA, 19 nt, Artificial Sequence
  source: /note="Description of Artificial Sequence: Synthetic oligonucleotide"
  source: /note="Antisense strand to SEQ ID NO: 4459"
ugacauagaagaaggaaac

SEQ ID NO: 4461 - RNA, 19 nt, Artificial Sequence
  source: /note="Description of Artificial Sequence: Synthetic oligonucleotide"
  source: /note="Sense strand starting at position 2045 of SEQ ID NO: 2231"
uacugugccucugggagaa

SEQ ID NO: 4462 - RNA, 19 nt, Artificial Sequence
  source: /note="Description of Artificial Sequence: Synthetic oligonucleotide"
  source: /note="Antisense strand to SEQ ID NO: 4461"
uucucccagaggcacagua

SEQ ID NO: 4463 - RNA, 19 nt, Artificial Sequence
  source: /note="Description of Artificial Sequence: Synthetic oligonucleotide"
  source: /note="Sense strand starting at position 2045 of SEQ ID NO: 2252"
agagaaugguauuggguuc

SEQ ID NO: 4464 - RNA, 19 nt, Artificial Sequence
  source: /note="Description of Artificial Sequence: Synthetic oligonucleotide"
  source: /note="Antisense strand to SEQ ID NO: 4463"
gaacccaauaccauucucu

SEQ ID NO: 4465 - RNA, 19 nt, Artificial Sequence
  source: /note="Description of Artificial Sequence: Synthetic oligonucleotide"
  source: /note="Sense strand starting at position 2045 of SEQ ID NO: 2265"
ggguucaaauguuuacgua

SEQ ID NO: 4466 - RNA, 19 nt, Artificial Sequence
  source: /note="Description of Artificial Sequence: Synthetic oligonucleotide"
  source: /note="Antisense strand to SEQ ID NO: 4465"
uacguaaacauuugaaccc

SEQ ID NO: 4467 - RNA, 19 nt, Artificial Sequence
  source: /note="Description of Artificial Sequence: Synthetic oligonucleotide"
  source: /note="Sense strand starting at position 2045 of SEQ ID NO: 2321"
uacucaagauguugccaga

SEQ ID NO: 4468 - RNA, 19 nt, Artificial Sequence
  source: /note="Description of Artificial Sequence: Synthetic oligonucleotide"
  source: /note="Antisense strand to SEQ ID NO: 4467"
ucuggcaacaucuugagua

SEQ ID NO: 4469 - RNA, 19 nt, Artificial Sequence
  source: /note="Description of Artificial Sequence: Synthetic oligonucleotide"
  source: /note="Sense strand starting at position 2045 of SEQ ID NO: 2432"
acuacuccauuagagagua

SEQ ID NO: 4470 - RNA, 19 nt, Artificial Sequence
  source: /note="Description of Artificial Sequence: Synthetic oligonucleotide"
  source: /note="Antisense strand to SEQ ID NO: 4469"
uacucucuaauggaguagu

SEQ ID NO: 4471 - RNA, 19 nt, Artificial Sequence
  source: /note="Description of Artificial Sequence: Synthetic oligonucleotide"
  source: /note="Sense strand starting at position 2045 of SEQ ID NO: 2480"
cccuguccuuuaggaacau

SEQ ID NO: 4472 - RNA, 19 nt, Artificial Sequence
  source: /note="Description of Artificial Sequence: Synthetic oligonucleotide"
  source: /note="Antisense strand to SEQ ID NO: 4471"
auguuccuaaaggacaggg

SEQ ID NO: 4473 - RNA, 19 nt, Artificial Sequence
  source: /note="Description of Artificial Sequence: Synthetic oligonucleotide"
  source: /note="Sense strand starting at position 2045 of SEQ ID NO: 2607"
ugagucugcucauugacgu

SEQ ID NO: 4474 - RNA, 19 nt, Artificial Sequence
  source: /note="Description of Artificial Sequence: Synthetic oligonucleotide"
  source: /note="Antisense strand to SEQ ID NO: 4473"
acgucaaugagcagacuca

SEQ ID NO: 4475 - RNA, 19 nt, Artificial Sequence
  source: /note="Description of Artificial Sequence: Synthetic oligonucleotide"
  source: /note="Sense strand starting at position 2045 of SEQ ID NO: 2608"
gagucugcucauugacguu

SEQ ID NO: 4476 - RNA, 19 nt, Artificial Sequence
  source: /note="Description of Artificial Sequence: Synthetic oligonucleotide"
  source: /note="Antisense strand to SEQ ID NO: 4475"
aacgucaaugagcagacuc

SEQ ID NO: 4477 - RNA, 19 nt, Artificial Sequence
  source: /note="Description of Artificial Sequence: Synthetic oligonucleotide"
  source: /note="Sense strand starting at position 2045 of SEQ ID NO: 2614"
gcucauugacguuaucucu

SEQ ID NO: 4478 - RNA, 19 nt, Artificial Sequence
  source: /note="Description of Artificial Sequence: Synthetic oligonucleotide"
  source: /note="Antisense strand to SEQ ID NO: 4477"
agagauaacgucaaugagc

SEQ ID NO: 4479 - RNA, 19 nt, Artificial Sequence
  source: /note="Description of Artificial Sequence: Synthetic oligonucleotide"
  source: /note="Sense strand starting at position 2045 of SEQ ID NO: 2621"
gacguuaucucugaguaaa

SEQ ID NO: 4480 - RNA, 19 nt, Artificial Sequence
  source: /note="Description of Artificial Sequence: Synthetic oligonucleotide"
  source: /note="Antisense strand to SEQ ID NO: 4479"
uuuacucagagauaacguc

SEQ ID NO: 4481 - RNA, 19 nt, Artificial Sequence
  source: /note="Description of Artificial Sequence: Synthetic oligonucleotide"
  source: /note="Sense strand starting at position 2045 of SEQ ID NO: 2623"
cguuaucucugaguaaagu

SEQ ID NO: 4482 - RNA, 19 nt, Artificial Sequence
  source: /note="Description of Artificial Sequence: Synthetic oligonucleotide"
  source: /note="Antisense strand to SEQ ID NO: 4481"
acuuuacucagagauaacg

SEQ ID NO: 4483 - RNA, 19 nt, Artificial Sequence
  source: /note="Description of Artificial Sequence: Synthetic oligonucleotide"
  source: /note="Sense strand starting at position 2045 of SEQ ID NO: 2634"
aguaaagugggcuguacuu

SEQ ID NO: 4484 - RNA, 19 nt, Artificial Sequence
  source: /note="Description of Artificial Sequence: Synthetic oligonucleotide"
  source: /note="Antisense strand to SEQ ID NO: 4483"
aaguacagcccacuuuacu

SEQ ID NO: 4485 - RNA, 19 nt, Artificial Sequence
  source: /note="Description of Artificial Sequence: Synthetic oligonucleotide"
  source: /note="Sense strand starting at position 2045 of SEQ ID NO: 2735"
uuagaaaugugucacucca

SEQ ID NO: 4486 - RNA, 19 nt, Artificial Sequence
  source: /note="Description of Artificial Sequence: Synthetic oligonucleotide"
  source: /note="Antisense strand to SEQ ID NO: 4485"
uggagugacacauuucuaa

SEQ ID NO: 4487 - RNA, 19 nt, Artificial Sequence
  source: /note="Description of Artificial Sequence: Synthetic oligonucleotide"
  source: /note="Sense strand starting at position 2045 of SEQ ID NO: 2819"
agaguagacucacacuaau

SEQ ID NO: 4488 - RNA, 19 nt, Artificial Sequence
  source: /note="Description of Artificial Sequence: Synthetic oligonucleotide"
  source: /note="Antisense strand to SEQ ID NO: 4487"
auuagugugagucuacucu

SEQ ID NO: 4489 - RNA, 19 nt, Artificial Sequence
  source: /note="Description of Artificial Sequence: Synthetic oligonucleotide"
  source: /note="Sense strand starting at position 2045 of SEQ ID NO: 2869"
cagggucugugugaagcau

SEQ ID NO: 4490 - RNA, 19 nt, Artificial Sequence
  source: /note="Description of Artificial Sequence: Synthetic oligonucleotide"
  source: /note="Antisense strand to SEQ ID NO: 4489"
augcuucacacagacccug

SEQ ID NO: 4491 - RNA, 19 nt, Artificial Sequence
  source: /note="Description of Artificial Sequence: Synthetic oligonucleotide"
  source: /note="Sense strand starting at position 2045 of SEQ ID NO: 2918"
ccuauuccaugaggucaau

SEQ ID NO: 4492 - RNA, 19 nt, Artificial Sequence
  source: /note="Description of Artificial Sequence: Synthetic oligonucleotide"
  source: /note="Antisense strand to SEQ ID NO: 4491"
auugaccucauggaauagg

SEQ ID NO: 4493 - RNA, 19 nt, Artificial Sequence
  source: /note="Description of Artificial Sequence: Synthetic oligonucleotide"
  source: /note="Sense strand starting at position 2045 of SEQ ID NO: 3657"
guuuccuucuccuauguca

SEQ ID NO: 4494 - RNA, 19 nt, Artificial Sequence
  source: /note="Description of Artificial Sequence: Synthetic oligonucleotide"
  source: /note="Antisense strand to SEQ ID NO: 4493"
ugacauaggagaaggaaac

SEQ ID NO: 4495 - RNA, 19 nt, Artificial Sequence
  source: /note="Description of Artificial Sequence: Synthetic oligonucleotide"
  source: /note="Sense strand starting at position 2045 of SEQ ID NO: 3734"
uugcuaugguuguuuccau

SEQ ID NO: 4496 - RNA, 19 nt, Artificial Sequence
  source: /note="Description of Artificial Sequence: Synthetic oligonucleotide"
  source: /note="Antisense strand to SEQ ID NO: 4495"
auggaaacaaccauagcaa

SEQ ID NO: 4497 - RNA, 19 nt, Artificial Sequence
  source: /note="Description of Artificial Sequence: Synthetic oligonucleotide"
  source: /note="Sense strand starting at position 2045 of SEQ ID NO: 3854"
ggcacuucuuucuaggcaa

SEQ ID NO: 4498 - RNA, 19 nt, Artificial Sequence
  source: /note="Description of Artificial Sequence: Synthetic oligonucleotide"
  source: /note="Antisense strand to SEQ ID NO: 4497"
uugccuagaaagaagugcc

SEQ ID NO: 4499 - RNA, 19 nt, Artificial Sequence
  source: /note="Description of Artificial Sequence: Synthetic oligonucleotide"
  source: /note="Sense strand starting at position 2045 of SEQ ID NO: 3861"
cuuucuaggcaauguguca

SEQ ID NO: 4500 - RNA, 19 nt, Artificial Sequence
  source: /note="Description of Artificial Sequence: Synthetic oligonucleotide"
  source: /note="Antisense strand to SEQ ID NO: 4499"
ugacacauugccuagaaag

SEQ ID NO: 4501 - RNA, 19 nt, Artificial Sequence
  source: /note="Description of Artificial Sequence: Synthetic oligonucleotide"
  source: /note="Sense strand starting at position 2045 of SEQ ID NO: 3897"
cuuucuguuuccuucguca

SEQ ID NO: 4502 - RNA, 19 nt, Artificial Sequence
  source: /note="Description of Artificial Sequence: Synthetic oligonucleotide"
  source: /note="Antisense strand to SEQ ID NO: 4501"
ugacgaaggaaacagaaag

SEQ ID NO: 4503 - RNA, 19 nt, Artificial Sequence
  source: /note="Description of Artificial Sequence: Synthetic oligonucleotide"
  source: /note="Sense strand starting at position 2045 of SEQ ID NO: 3899"
uucuguuuccuucgucaga

SEQ ID NO: 4504 - RNA, 19 nt, Artificial Sequence
  source: /note="Description of Artificial Sequence: Synthetic oligonucleotide"
  source: /note="Antisense strand to SEQ ID NO: 4503"
ucugacgaaggaaacagaa

SEQ ID NO: 4505 - RNA, 19 nt, Artificial Sequence
  source: /note="Description of Artificial Sequence: Synthetic oligonucleotide"
  source: /note="Sense strand starting at position 2045 of SEQ ID NO: 3901"
cuguuuccuucgucagaca

SEQ ID NO: 4506 - RNA, 19 nt, Artificial Sequence
  source: /note="Description of Artificial Sequence: Synthetic oligonucleotide"
  source: /note="Antisense strand to SEQ ID NO: 4505"
ugucugacgaaggaaacag

SEQ ID NO: 4507 - RNA, 19 nt, Artificial Sequence
  source: /note="Description of Artificial Sequence: Synthetic oligonucleotide"
  source: /note="Sense strand starting at position 2045 of SEQ ID NO: 3904"
uuuccuucgucagacaacu

SEQ ID NO: 4508 - RNA, 19 nt, Artificial Sequence
  source: /note="Description of Artificial Sequence: Synthetic oligonucleotide"
  source: /note="Antisense strand to SEQ ID NO: 4507"
aguugucugacgaaggaaa

SEQ ID NO: 4509 - RNA, 19 nt, Artificial Sequence
  source: /note="Description of Artificial Sequence: Synthetic oligonucleotide"
  source: /note="Sense strand starting at position 2047 of SEQ ID NO: 219"
auagcauccuuggaaucaa

SEQ ID NO: 4510 - RNA, 19 nt, Artificial Sequence
  source: /note="Description of Artificial Sequence: Synthetic oligonucleotide"
  source: /note="Antisense strand to SEQ ID NO: 4509"
uugauuccaaggaugcuau

SEQ ID NO: 4511 - RNA, 19 nt, Artificial Sequence
  source: /note="Description of Artificial Sequence: Synthetic oligonucleotide"
  source: /note="Sense strand starting at position 2047 of SEQ ID NO: 387"
aacacucuuuagugggaaa

SEQ ID NO: 4512 - RNA, 19 nt, Artificial Sequence
  source: /note="Description of Artificial Sequence: Synthetic oligonucleotide"
  source: /note="Antisense strand to SEQ ID NO: 4511"
uuucccacuaaagaguguu

SEQ ID NO: 4513 - RNA, 19 nt, Artificial Sequence
  source: /note="Description of Artificial Sequence: Synthetic oligonucleotide"
  source: /note="Sense strand starting at position 2047 of SEQ ID NO: 390"
acucuuuagugggaaaggu

SEQ ID NO: 4514 - RNA, 19 nt, Artificial Sequence
  source: /note="Description of Artificial Sequence: Synthetic oligonucleotide"
  source: /note="Antisense strand to SEQ ID NO: 4513"
accuuucccacuaaagagu

SEQ ID NO: 4515 - RNA, 19 nt, Artificial Sequence
  source: /note="Description of Artificial Sequence: Synthetic oligonucleotide"
  source: /note="Sense strand starting at position 2047 of SEQ ID NO: 474"
ucuacaaauucggguuuaa

SEQ ID NO: 4516 - RNA, 19 nt, Artificial Sequence
  source: /note="Description of Artificial Sequence: Synthetic oligonucleotide"
  source: /note="Antisense strand to SEQ ID NO: 4515"
uuaaacccgaauuuguaga

SEQ ID NO: 4517 - RNA, 19 nt, Artificial Sequence
  source: /note="Description of Artificial Sequence: Synthetic oligonucleotide"
  source: /note="Sense strand starting at position 2047 of SEQ ID NO: 543"
guaucuuuauguugcugga

SEQ ID NO: 4518 - RNA, 19 nt, Artificial Sequence
  source: /note="Description of Artificial Sequence: Synthetic oligonucleotide"
  source: /note="Antisense strand to SEQ ID NO: 4517"
uccagcaacauaaagauac

SEQ ID NO: 4519 - RNA, 19 nt, Artificial Sequence
  source: /note="Description of Artificial Sequence: Synthetic oligonucleotide"
  source: /note="Sense strand starting at position 2047 of SEQ ID NO: 546"
ucuuuauguugcuggaguu

SEQ ID NO: 4520 - RNA, 19 nt, Artificial Sequence
  source: /note="Description of Artificial Sequence: Synthetic oligonucleotide"
  source: /note="Antisense strand to SEQ ID NO: 4519"
aacuccagcaacauaaaga

SEQ ID NO: 4521 - RNA, 19 nt, Artificial Sequence
  source: /note="Description of Artificial Sequence: Synthetic oligonucleotide"
  source: /note="Sense strand starting at position 2047 of SEQ ID NO: 568"
uuauguggcucugauuaaa

SEQ ID NO: 4522 - RNA, 19 nt, Artificial Sequence
  source: /note="Description of Artificial Sequence: Synthetic oligonucleotide"
  source: /note="Antisense strand to SEQ ID NO: 4521"
uuuaaucagagccacauaa

SEQ ID NO: 4523 - RNA, 19 nt, Artificial Sequence
  source: /note="Description of Artificial Sequence: Synthetic oligonucleotide"
  source: /note="Sense strand starting at position 2047 of SEQ ID NO: 598"
ucuguaagcugucuccuuu

SEQ ID NO: 4524 - RNA, 19 nt, Artificial Sequence
  source: /note="Description of Artificial Sequence: Synthetic oligonucleotide"
  source: /note="Antisense strand to SEQ ID NO: 4523"
aaaggagacagcuuacaga

SEQ ID NO: 4525 - RNA, 19 nt, Artificial Sequence
  source: /note="Description of Artificial Sequence: Synthetic oligonucleotide"
  source: /note="Sense strand starting at position 2047 of SEQ ID NO: 740"
agcucuuucuggcaccaga

SEQ ID NO: 4526 - RNA, 19 nt, Artificial Sequence
  source: /note="Description of Artificial Sequence: Synthetic oligonucleotide"
  source: /note="Antisense strand to SEQ ID NO: 4525"
ucuggugccagaaagagcu

SEQ ID NO: 4527 - RNA, 19 nt, Artificial Sequence
  source: /note="Description of Artificial Sequence: Synthetic oligonucleotide"
  source: /note="Sense strand starting at position 2047 of SEQ ID NO: 826"
cuuggaugauuaugcuuau

SEQ ID NO: 4528 - RNA, 19 nt, Artificial Sequence
  source: /note="Description of Artificial Sequence: Synthetic oligonucleotide"
  source: /note="Antisense strand to SEQ ID NO: 4527"
auaagcauaaucauccaag

SEQ ID NO: 4529 - RNA, 19 nt, Artificial Sequence
  source: /note="Description of Artificial Sequence: Synthetic oligonucleotide"
  source: /note="Sense strand starting at position 2047 of SEQ ID NO: 832"
ugauuaugcuuaugcucua

SEQ ID NO: 4530 - RNA, 19 nt, Artificial Sequence
  source: /note="Description of Artificial Sequence: Synthetic oligonucleotide"
  source: /note="Antisense strand to SEQ ID NO: 4529"
uagagcauaagcauaauca

SEQ ID NO: 4531 - RNA, 19 nt, Artificial Sequence
  source: /note="Description of Artificial Sequence: Synthetic oligonucleotide"
  source: /note="Sense strand starting at position 2047 of SEQ ID NO: 1003"
agcuaaugcuuguauggua

SEQ ID NO: 4532 - RNA, 19 nt, Artificial Sequence
  source: /note="Description of Artificial Sequence: Synthetic oligonucleotide"
  source: /note="Antisense strand to SEQ ID NO: 4531"
uaccauacaagcauuagcu

SEQ ID NO: 4533 - RNA, 19 nt, Artificial Sequence
  source: /note="Description of Artificial Sequence: Synthetic oligonucleotide"
  source: /note="Sense strand starting at position 2047 of SEQ ID NO: 1006"
uaaugcuuguaugguauuu

SEQ ID NO: 4534 - RNA, 19 nt, Artificial Sequence
  source: /note="Description of Artificial Sequence: Synthetic oligonucleotide"
  source: /note="Antisense strand to SEQ ID NO: 4533"
aaauaccauacaagcauua

SEQ ID NO: 4535 - RNA, 19 nt, Artificial Sequence
  source: /note="Description of Artificial Sequence: Synthetic oligonucleotide"
  source: /note="Sense strand starting at position 2047 of SEQ ID NO: 1019"
guauuuaccuuaugccaga

SEQ ID NO: 4536 - RNA, 19 nt, Artificial Sequence
  source: /note="Description of Artificial Sequence: Synthetic oligonucleotide"
  source: /note="Antisense strand to SEQ ID NO: 4535"
ucuggcauaagguaaauac

SEQ ID NO: 4537 - RNA, 19 nt, Artificial Sequence
  source: /note="Description of Artificial Sequence: Synthetic oligonucleotide"
  source: /note="Sense strand starting at position 2047 of SEQ ID NO: 1038"
cacgguucugagugcuuua

SEQ ID NO: 4538 - RNA, 19 nt, Artificial Sequence
  source: /note="Description of Artificial Sequence: Synthetic oligonucleotide"
  source: /note="Antisense strand to SEQ ID NO: 4537"
uaaagcacucagaaccgug

SEQ ID NO: 4539 - RNA, 19 nt, Artificial Sequence
  source: /note="Description of Artificial Sequence: Synthetic oligonucleotide"
  source: /note="Sense strand starting at position 2047 of SEQ ID NO: 1213"
cagacucugugcuauuagu

SEQ ID NO: 4540 - RNA, 19 nt, Artificial Sequence
  source: /note="Description of Artificial Sequence: Synthetic oligonucleotide"
  source: /note="Antisense strand to SEQ ID NO: 4539"
acuaauagcacagagucug

SEQ ID NO: 4541 - RNA, 19 nt, Artificial Sequence
  source: /note="Description of Artificial Sequence: Synthetic oligonucleotide"
  source: /note="Sense strand starting at position 2047 of SEQ ID NO: 1393"
uuagaauugucuuaucgau

SEQ ID NO: 4542 - RNA, 19 nt, Artificial Sequence
  source: /note="Description of Artificial Sequence: Synthetic oligonucleotide"
  source: /note="Antisense strand to SEQ ID NO: 4541"
aucgauaagacaauucuaa

SEQ ID NO: 4543 - RNA, 19 nt, Artificial Sequence
  source: /note="Description of Artificial Sequence: Synthetic oligonucleotide"
  source: /note="Sense strand starting at position 2047 of SEQ ID NO: 1566"
ugcuauuagucccaucugu

SEQ ID NO: 4544 - RNA, 19 nt, Artificial Sequence
  source: /note="Description of Artificial Sequence: Synthetic oligonucleotide"
  source: /note="Antisense strand to SEQ ID NO: 4543"
acagaugggacuaauagca

SEQ ID NO: 4545 - RNA, 19 nt, Artificial Sequence
  source: /note="Description of Artificial Sequence: Synthetic oligonucleotide"
  source: /note="Sense strand starting at position 2047 of SEQ ID NO: 1675"
ugagcauccuggugaguuu

SEQ ID NO: 4546 - RNA, 19 nt, Artificial Sequence
  source: /note="Description of Artificial Sequence: Synthetic oligonucleotide"
  source: /note="Antisense strand to SEQ ID NO: 4545"
aaacucaccaggaugcuca

SEQ ID NO: 4547 - RNA, 19 nt, Artificial Sequence
  source: /note="Description of Artificial Sequence: Synthetic oligonucleotide"
  source: /note="Sense strand starting at position 2047 of SEQ ID NO: 1684"
uggugaguuugggauucuu

SEQ ID NO: 4548 - RNA, 19 nt, Artificial Sequence
  source: /note="Description of Artificial Sequence: Synthetic oligonucleotide"
  source: /note="Antisense strand to SEQ ID NO: 4547"
aagaaucccaaacucacca

SEQ ID NO: 4549 - RNA, 19 nt, Artificial Sequence
  source: /note="Description of Artificial Sequence: Synthetic oligonucleotide"
  source: /note="Sense strand starting at position 2047 of SEQ ID NO: 1692"
uugggauucuuguaauucu

SEQ ID NO: 4550 - RNA, 19 nt, Artificial Sequence
  source: /note="Description of Artificial Sequence: Synthetic oligonucleotide"
  source: /note="Antisense strand to SEQ ID NO: 4549"
agaauuacaagaaucccaa

SEQ ID NO: 4551 - RNA, 19 nt, Artificial Sequence
  source: /note="Description of Artificial Sequence: Synthetic oligonucleotide"
  source: /note="Sense strand starting at position 2047 of SEQ ID NO: 1882"
gugcacuguuugugacaag

SEQ ID NO: 4552 - RNA, 19 nt, Artificial Sequence
  source: /note="Description of Artificial Sequence: Synthetic oligonucleotide"
  source: /note="Antisense strand to SEQ ID NO: 4551"
cuugucacaaacagugcac

SEQ ID NO: 4553 - RNA, 19 nt, Artificial Sequence
  source: /note="Description of Artificial Sequence: Synthetic oligonucleotide"
  source: /note="Sense strand starting at position 2047 of SEQ ID NO: 1883"
ugcacuguuugugacaagu

SEQ ID NO: 4554 - RNA, 19 nt, Artificial Sequence
  source: /note="Description of Artificial Sequence: Synthetic oligonucleotide"
  source: /note="Antisense strand to SEQ ID NO: 4553"
acuugucacaaacagugca

SEQ ID NO: 4555 - RNA, 19 nt, Artificial Sequence
  source: /note="Description of Artificial Sequence: Synthetic oligonucleotide"
  source: /note="Sense strand starting at position 2047 of SEQ ID NO: 1927"
ggaguugcauccuguacau

SEQ ID NO: 4556 - RNA, 19 nt, Artificial Sequence
  source: /note="Description of Artificial Sequence: Synthetic oligonucleotide"
  source: /note="Antisense strand to SEQ ID NO: 4555"
auguacaggaugcaacucc

SEQ ID NO: 4557 - RNA, 19 nt, Artificial Sequence
  source: /note="Description of Artificial Sequence: Synthetic oligonucleotide"
  source: /note="Sense strand starting at position 2047 of SEQ ID NO: 1939"
uguacauuguggcaggagu

SEQ ID NO: 4558 - RNA, 19 nt, Artificial Sequence
  source: /note="Description of Artificial Sequence: Synthetic oligonucleotide"
  source: /note="Antisense strand to SEQ ID NO: 4557"
acuccugccacaauguaca

SEQ ID NO: 4559 - RNA, 19 nt, Artificial Sequence
  source: /note="Description of Artificial Sequence: Synthetic oligonucleotide"
  source: /note="Sense strand starting at position 2047 of SEQ ID NO: 1955"
aguugagguuacugugagu

SEQ ID NO: 4560 - RNA, 19 nt, Artificial Sequence
  source: /note="Description of Artificial Sequence: Synthetic oligonucleotide"
  source: /note="Antisense strand to SEQ ID NO: 4559"
acucacaguaaccucaacu

SEQ ID NO: 4561 - RNA, 19 nt, Artificial Sequence
  source: /note="Description of Artificial Sequence: Synthetic oligonucleotide"
  source: /note="Sense strand starting at position 2047 of SEQ ID NO: 1958"
ugagguuacugugaguagu

SEQ ID NO: 4562 - RNA, 19 nt, Artificial Sequence
  source: /note="Description of Artificial Sequence: Synthetic oligonucleotide"
  source: /note="Antisense strand to SEQ ID NO: 4561"
acuacucacaguaaccuca

SEQ ID NO: 4563 - RNA, 19 nt, Artificial Sequence
  source: /note="Description of Artificial Sequence: Synthetic oligonucleotide"
  source: /note="Sense strand starting at position 2047 of SEQ ID NO: 1964"
uacugugaguagugauuaa

SEQ ID NO: 4564 - RNA, 19 nt, Artificial Sequence
  source: /note="Description of Artificial Sequence: Synthetic oligonucleotide"
  source: /note="Antisense strand to SEQ ID NO: 4563"
uuaaucacuacucacagua

SEQ ID NO: 4565 - RNA, 19 nt, Artificial Sequence
  source: /note="Description of Artificial Sequence: Synthetic oligonucleotide"
  source: /note="Sense strand starting at position 2047 of SEQ ID NO: 2211"
agcccacacuuaggugaua

SEQ ID NO: 4566 - RNA, 19 nt, Artificial Sequence
  source: /note="Description of Artificial Sequence: Synthetic oligonucleotide"
  source: /note="Antisense strand to SEQ ID NO: 4565"
uaucaccuaagugugggcu

SEQ ID NO: 4567 - RNA, 19 nt, Artificial Sequence
  source: /note="Description of Artificial Sequence: Synthetic oligonucleotide"
  source: /note="Sense strand starting at position 2047 of SEQ ID NO: 2431"
guguauugguuuccuguuu

SEQ ID NO: 4568 - RNA, 19 nt, Artificial Sequence
  source: /note="Description of Artificial Sequence: Synthetic oligonucleotide"
  source: /note="Antisense strand to SEQ ID NO: 4567"
aaacaggaaaccaauacac

SEQ ID NO: 4569 - RNA, 19 nt, Artificial Sequence
  source: /note="Description of Artificial Sequence: Synthetic oligonucleotide"
  source: /note="Sense strand starting at position 2047 of SEQ ID NO: 2573"
gguacuguuuaacgcuauu

SEQ ID NO: 4570 - RNA, 19 nt, Artificial Sequence
  source: /note="Description of Artificial Sequence: Synthetic oligonucleotide"
  source: /note="Antisense strand to SEQ ID NO: 4569"
aauagcguuaaacaguacc

SEQ ID NO: 4571 - RNA, 19 nt, Artificial Sequence
  source: /note="Description of Artificial Sequence: Synthetic oligonucleotide"
  source: /note="Sense strand starting at position 2047 of SEQ ID NO: 2616"
guuuaagucucuuaauguc

SEQ ID NO: 4572 - RNA, 19 nt, Artificial Sequence
  source: /note="Description of Artificial Sequence: Synthetic oligonucleotide"
  source: /note="Antisense strand to SEQ ID NO: 4571"
gacauuaagagacuuaaac

SEQ ID NO: 4573 - RNA, 19 nt, Artificial Sequence
  source: /note="Description of Artificial Sequence: Synthetic oligonucleotide"
  source: /note="Sense strand starting at position 2047 of SEQ ID NO: 2626"
cuuaaugucuauuguacau

SEQ ID NO: 4574 - RNA, 19 nt, Artificial Sequence
  source: /note="Description of Artificial Sequence: Synthetic oligonucleotide"
  source: /note="Antisense strand to SEQ ID NO: 4573"
auguacaauagacauuaag

SEQ ID NO: 4575 - RNA, 19 nt, Artificial Sequence
  source: /note="Description of Artificial Sequence: Synthetic oligonucleotide"
  source: /note="Sense strand starting at position 2047 of SEQ ID NO: 2653"
gggugcgauuguuaaauac

SEQ ID NO: 4576 - RNA, 19 nt, Artificial Sequence
  source: /note="Description of Artificial Sequence: Synthetic oligonucleotide"
  source: /note="Antisense strand to SEQ ID NO: 4575"
guauuuaacaaucgcaccc

SEQ ID NO: 4577 - RNA, 19 nt, Artificial Sequence
  source: /note="Description of Artificial Sequence: Synthetic oligonucleotide"
  source: /note="Sense strand starting at position 2047 of SEQ ID NO: 2691"
caaggauacugaugcuagu

SEQ ID NO: 4578 - RNA, 19 nt, Artificial Sequence
  source: /note="Description of Artificial Sequence: Synthetic oligonucleotide"
  source: /note="Antisense strand to SEQ ID NO: 4577"
acuagcaucaguauccuug

SEQ ID NO: 4579 - RNA, 19 nt, Artificial Sequence
  source: /note="Description of Artificial Sequence: Synthetic oligonucleotide"
  source: /note="Sense strand starting at position 2047 of SEQ ID NO: 2721"
cuuuguauguguuaugugu

SEQ ID NO: 4580 - RNA, 19 nt, Artificial Sequence
  source: /note="Description of Artificial Sequence: Synthetic oligonucleotide"
  source: /note="Antisense strand to SEQ ID NO: 4579"
acacauaacacauacaaag

SEQ ID NO: 4581 - RNA, 19 nt, Artificial Sequence
  source: /note="Description of Artificial Sequence: Synthetic oligonucleotide"
  source: /note="Sense strand starting at position 2047 of SEQ ID NO: 2723"
uuguauguguuauguguaa

SEQ ID NO: 4582 - RNA, 19 nt, Artificial Sequence
  source: /note="Description of Artificial Sequence: Synthetic oligonucleotide"
  source: /note="Antisense strand to SEQ ID NO: 4581"
uuacacauaacacauacaa

SEQ ID NO: 4583 - RNA, 19 nt, Artificial Sequence
  source: /note="Description of Artificial Sequence: Synthetic oligonucleotide"
  source: /note="Sense strand starting at position 2047 of SEQ ID NO: 2924"
gcugaacaauuguacggau

SEQ ID NO: 4584 - RNA, 19 nt, Artificial Sequence
  source: /note="Description of Artificial Sequence: Synthetic oligonucleotide"
  source: /note="Antisense strand to SEQ ID NO: 4583"
auccguacaauuguucagc

SEQ ID NO: 4585 - RNA, 19 nt, Artificial Sequence
  source: /note="Description of Artificial Sequence: Synthetic oligonucleotide"
  source: /note="Sense strand starting at position 2047 of SEQ ID NO: 2927"
gaacaauuguacggauaua

SEQ ID NO: 4586 - RNA, 19 nt, Artificial Sequence
  source: /note="Description of Artificial Sequence: Synthetic oligonucleotide"
  source: /note="Antisense strand to SEQ ID NO: 4585"
uauauccguacaauuguuc

SEQ ID NO: 4587 - RNA, 19 nt, Artificial Sequence
  source: /note="Description of Artificial Sequence: Synthetic oligonucleotide"
  source: /note="Sense strand starting at position 2047 of SEQ ID NO: 3059"
uaaagaugguauugucugu

SEQ ID NO: 4588 - RNA, 19 nt, Artificial Sequence
  source: /note="Description of Artificial Sequence: Synthetic oligonucleotide"
  source: /note="Antisense strand to SEQ ID NO: 4587"
acagacaauaccaucuuua

SEQ ID NO: 4589 - RNA, 19 nt, Artificial Sequence
  source: /note="Description of Artificial Sequence: Synthetic oligonucleotide"
  source: /note="Sense strand starting at position 2047 of SEQ ID NO: 3099"
acaauauugucuggucuuu

SEQ ID NO: 4590 - RNA, 19 nt, Artificial Sequence
  source: /note="Description of Artificial Sequence: Synthetic oligonucleotide"
  source: /note="Antisense strand to SEQ ID NO: 4589"
aaagaccagacaauauugu

SEQ ID NO: 4591 - RNA, 19 nt, Artificial Sequence
  source: /note="Description of Artificial Sequence: Synthetic oligonucleotide"
  source: /note="Sense strand starting at position 2047 of SEQ ID NO: 3209"
cuuacagacuugugaagug

SEQ ID NO: 4592 - RNA, 19 nt, Artificial Sequence
  source: /note="Description of Artificial Sequence: Synthetic oligonucleotide"
  source: /note="Antisense strand to SEQ ID NO: 4591"
cacuucacaagucuguaag

SEQ ID NO: 4593 - RNA, 19 nt, Artificial Sequence
  source: /note="Description of Artificial Sequence: Synthetic oligonucleotide"
  source: /note="Sense strand starting at position 2047 of SEQ ID NO: 3615"
uucuaugcguuagguaaug

SEQ ID NO: 4594 - RNA, 19 nt, Artificial Sequence
  source: /note="Description of Artificial Sequence: Synthetic oligonucleotide"
  source: /note="Antisense strand to SEQ ID NO: 4593"
cauuaccuaacgcauagaa

SEQ ID NO: 4595 - RNA, 19 nt, Artificial Sequence
  source: /note="Description of Artificial Sequence: Synthetic oligonucleotide"
  source: /note="Sense strand starting at position 2047 of SEQ ID NO: 3625"
uagguaauguucggagaau

SEQ ID NO: 4596 - RNA, 19 nt, Artificial Sequence
  source: /note="Description of Artificial Sequence: Synthetic oligonucleotide"
  source: /note="Antisense strand to SEQ ID NO: 4595"
auucuccgaacauuaccua

SEQ ID NO: 4597 - RNA, 19 nt, Artificial Sequence
  source: /note="Description of Artificial Sequence: Synthetic oligonucleotide"
  source: /note="Sense strand starting at position 2047 of SEQ ID NO: 3626"
agguaauguucggagaaua

SEQ ID NO: 4598 - RNA, 19 nt, Artificial Sequence
  source: /note="Description of Artificial Sequence: Synthetic oligonucleotide"
  source: /note="Antisense strand to SEQ ID NO: 4597"
uauucuccgaacauuaccu

SEQ ID NO: 4599 - RNA, 19 nt, Artificial Sequence
  source: /note="Description of Artificial Sequence: Synthetic oligonucleotide"
  source: /note="Sense strand starting at position 2047 of SEQ ID NO: 3715"
ggccaaaucucaugaacuu

SEQ ID NO: 4600 - RNA, 19 nt, Artificial Sequence
  source: /note="Description of Artificial Sequence: Synthetic oligonucleotide"
  source: /note="Antisense strand to SEQ ID NO: 4599"
aaguucaugagauuuggcc

SEQ ID NO: 4601 - RNA, 19 nt, Artificial Sequence
  source: /note="Description of Artificial Sequence: Synthetic oligonucleotide"
  source: /note="Sense strand starting at position 2047 of SEQ ID NO: 3811"
uuugguagucuguguguua

SEQ ID NO: 4602 - RNA, 19 nt, Artificial Sequence
  source: /note="Description of Artificial Sequence: Synthetic oligonucleotide"
  source: /note="Antisense strand to SEQ ID NO: 4601"
uaacacacagacuaccaaa

SEQ ID NO: 4603 - RNA, 19 nt, Artificial Sequence
  source: /note="Description of Artificial Sequence: Synthetic oligonucleotide"
  source: /note="Sense strand starting at position 2047 of SEQ ID NO: 3812"
uugguagucuguguguuau

SEQ ID NO: 4604 - RNA, 19 nt, Artificial Sequence
  source: /note="Description of Artificial Sequence: Synthetic oligonucleotide"
  source: /note="Antisense strand to SEQ ID NO: 4603"
auaacacacagacuaccaa

SEQ ID NO: 4605 - RNA, 19 nt, Artificial Sequence
  source: /note="Description of Artificial Sequence: Synthetic oligonucleotide"
  source: /note="Sense strand starting at position 2047 of SEQ ID NO: 3816"
uagucuguguguuauuuau

SEQ ID NO: 4606 - RNA, 19 nt, Artificial Sequence
  source: /note="Description of Artificial Sequence: Synthetic oligonucleotide"
  source: /note="Antisense strand to SEQ ID NO: 4605"
auaaauaacacacagacua

SEQ ID NO: 4607 - RNA, 19 nt, Artificial Sequence
  source: /note="Description of Artificial Sequence: Synthetic oligonucleotide"
  source: /note="Sense strand starting at position 2047 of SEQ ID NO: 3983"
ugagguauuugauguucuc

SEQ ID NO: 4608 - RNA, 19 nt, Artificial Sequence
  source: /note="Description of Artificial Sequence: Synthetic oligonucleotide"
  source: /note="Antisense strand to SEQ ID NO: 4607"
gagaacaucaaauaccuca

SEQ ID NO: 4609 - RNA, 19 nt, Artificial Sequence
  source: /note="Description of Artificial Sequence: Synthetic oligonucleotide"
  source: /note="Sense strand starting at position 2048 of SEQ ID NO: 45"
aggaaacugguguguuagu

SEQ ID NO: 4610 - RNA, 19 nt, Artificial Sequence
  source: /note="Description of Artificial Sequence: Synthetic oligonucleotide"
  source: /note="Antisense strand to SEQ ID NO: 4609"
acuaacacaccaguuuccu

SEQ ID NO: 4611 - RNA, 19 nt, Artificial Sequence
  source: /note="Description of Artificial Sequence: Synthetic oligonucleotide"
  source: /note="Sense strand starting at position 2048 of SEQ ID NO: 46"
ggaaacugguguguuaguu

SEQ ID NO: 4612 - RNA, 19 nt, Artificial Sequence
  source: /note="Description of Artificial Sequence: Synthetic oligonucleotide"
  source: /note="Antisense strand to SEQ ID NO: 4611"
aacuaacacaccaguuucc

SEQ ID NO: 4613 - RNA, 19 nt, Artificial Sequence
  source: /note="Description of Artificial Sequence: Synthetic oligonucleotide"
  source: /note="Sense strand starting at position 2048 of SEQ ID NO: 59"
uuaguuacagcgugaauuu

SEQ ID NO: 4614 - RNA, 19 nt, Artificial Sequence
  source: /note="Description of Artificial Sequence: Synthetic oligonucleotide"
  source: /note="Antisense strand to SEQ ID NO: 4613"
aaauucacgcuguaacuaa

SEQ ID NO: 4615 - RNA, 19 nt, Artificial Sequence
  source: /note="Description of Artificial Sequence: Synthetic oligonucleotide"
  source: /note="Sense strand starting at position 2048 of SEQ ID NO: 69"
cgugaauuucaaggcaguu

SEQ ID NO: 4616 - RNA, 19 nt, Artificial Sequence
  source: /note="Description of Artificial Sequence: Synthetic oligonucleotide"
  source: /note="Antisense strand to SEQ ID NO: 4615"
aacugccuugaaauucacg

SEQ ID NO: 4617 - RNA, 19 nt, Artificial Sequence
  source: /note="Description of Artificial Sequence: Synthetic oligonucleotide"
  source: /note="Sense strand starting at position 2048 of SEQ ID NO: 191"
gcugguucucaggagggaa

SEQ ID NO: 4618 - RNA, 19 nt, Artificial Sequence
  source: /note="Description of Artificial Sequence: Synthetic oligonucleotide"
  source: /note="Antisense strand to SEQ ID NO: 4617"
uucccuccugagaaccagc

SEQ ID NO: 4619 - RNA, 19 nt, Artificial Sequence
  source: /note="Description of Artificial Sequence: Synthetic oligonucleotide"
  source: /note="Sense strand starting at position 2048 of SEQ ID NO: 238"
ggcugucucucugcaacua

SEQ ID NO: 4620 - RNA, 19 nt, Artificial Sequence
  source: /note="Description of Artificial Sequence: Synthetic oligonucleotide"
  source: /note="Antisense strand to SEQ ID NO: 4619"
uaguugcagagagacagcc

SEQ ID NO: 4621 - RNA, 19 nt, Artificial Sequence
  source: /note="Description of Artificial Sequence: Synthetic oligonucleotide"
  source: /note="Sense strand starting at position 2048 of SEQ ID NO: 239"
gcugucucucugcaacuaa

SEQ ID NO: 4622 - RNA, 19 nt, Artificial Sequence
  source: /note="Description of Artificial Sequence: Synthetic oligonucleotide"
  source: /note="Antisense strand to SEQ ID NO: 4621"
uuaguugcagagagacagc

SEQ ID NO: 4623 - RNA, 19 nt, Artificial Sequence
  source: /note="Description of Artificial Sequence: Synthetic oligonucleotide"
  source: /note="Sense strand starting at position 2048 of SEQ ID NO: 276"
gcucuaacucaggaucaug

SEQ ID NO: 4624 - RNA, 19 nt, Artificial Sequence
  source: /note="Description of Artificial Sequence: Synthetic oligonucleotide"
  source: /note="Antisense strand to SEQ ID NO: 4623"
caugauccugaguuagagc

SEQ ID NO: 4625 - RNA, 19 nt, Artificial Sequence
  source: /note="Description of Artificial Sequence: Synthetic oligonucleotide"
  source: /note="Sense strand starting at position 2048 of SEQ ID NO: 484"
gagauucugaggcaacguu

SEQ ID NO: 4626 - RNA, 19 nt, Artificial Sequence
  source: /note="Description of Artificial Sequence: Synthetic oligonucleotide"
  source: /note="Antisense strand to SEQ ID NO: 4625"
aacguugccucagaaucuc

SEQ ID NO: 4627 - RNA, 19 nt, Artificial Sequence
  source: /note="Description of Artificial Sequence: Synthetic oligonucleotide"
  source: /note="Sense strand starting at position 2048 of SEQ ID NO: 710"
gggacuugucgucgccuuu

SEQ ID NO: 4628 - RNA, 19 nt, Artificial Sequence
  source: /note="Description of Artificial Sequence: Synthetic oligonucleotide"
  source: /note="Antisense strand to SEQ ID NO: 4627"
aaaggcgacgacaaguccc

SEQ ID NO: 4629 - RNA, 19 nt, Artificial Sequence
  source: /note="Description of Artificial Sequence: Synthetic oligonucleotide"
  source: /note="Sense strand starting at position 2048 of SEQ ID NO: 784"
caaggugaggcucagacuu

SEQ ID NO: 4630 - RNA, 19 nt, Artificial Sequence
  source: /note="Description of Artificial Sequence: Synthetic oligonucleotide"
  source: /note="Antisense strand to SEQ ID NO: 4629"
aagucugagccucaccuug

SEQ ID NO: 4631 - RNA, 19 nt, Artificial Sequence
  source: /note="Description of Artificial Sequence: Synthetic oligonucleotide"
  source: /note="Sense strand starting at position 2048 of SEQ ID NO: 1185"
ccagcuccgaguuagaaga

SEQ ID NO: 4632 - RNA, 19 nt, Artificial Sequence
  source: /note="Description of Artificial Sequence: Synthetic oligonucleotide"
  source: /note="Antisense strand to SEQ ID NO: 4631"
ucuucuaacucggagcugg

SEQ ID NO: 4633 - RNA, 19 nt, Artificial Sequence
  source: /note="Description of Artificial Sequence: Synthetic oligonucleotide"
  source: /note="Sense strand starting at position 2048 of SEQ ID NO: 1387"
agaggagacucgcuuaaac

SEQ ID NO: 4634 - RNA, 19 nt, Artificial Sequence
  source: /note="Description of Artificial Sequence: Synthetic oligonucleotide"
  source: /note="Antisense strand to SEQ ID NO: 4633"
guuuaagcgagucuccucu

SEQ ID NO: 4635 - RNA, 19 nt, Artificial Sequence
  source: /note="Description of Artificial Sequence: Synthetic oligonucleotide"
  source: /note="Sense strand starting at position 2048 of SEQ ID NO: 1638"
ccacaagucucccagggau

SEQ ID NO: 4636 - RNA, 19 nt, Artificial Sequence
  source: /note="Description of Artificial Sequence: Synthetic oligonucleotide"
  source: /note="Antisense strand to SEQ ID NO: 4635"
aucccugggagacuugugg

SEQ ID NO: 4637 - RNA, 19 nt, Artificial Sequence
  source: /note="Description of Artificial Sequence: Synthetic oligonucleotide"
  source: /note="Sense strand starting at position 2048 of SEQ ID NO: 1659"
agugauuauuuguacccaa

SEQ ID NO: 4638 - RNA, 19 nt, Artificial Sequence
  source: /note="Description of Artificial Sequence: Synthetic oligonucleotide"
  source: /note="Antisense strand to SEQ ID NO: 4637"
uuggguacaaauaaucacu

SEQ ID NO: 4639 - RNA, 19 nt, Artificial Sequence
  source: /note="Description of Artificial Sequence: Synthetic oligonucleotide"
  source: /note="Sense strand starting at position 2048 of SEQ ID NO: 2017"
gccgaugugacaucggcuu

SEQ ID NO: 4640 - RNA, 19 nt, Artificial Sequence
  source: /note="Description of Artificial Sequence: Synthetic oligonucleotide"
  source: /note="Antisense strand to SEQ ID NO: 4639"
aagccgaugucacaucggc

SEQ ID NO: 4641 - RNA, 19 nt, Artificial Sequence
  source: /note="Description of Artificial Sequence: Synthetic oligonucleotide"
  source: /note="Sense strand starting at position 2048 of SEQ ID NO: 2059"
ccacuccaguccuucgaaa

SEQ ID NO: 4642 - RNA, 19 nt, Artificial Sequence
  source: /note="Description of Artificial Sequence: Synthetic oligonucleotide"
  source: /note="Antisense strand to SEQ ID NO: 4641"
uuucgaaggacuggagugg

SEQ ID NO: 4643 - RNA, 19 nt, Artificial Sequence
  source: /note="Description of Artificial Sequence: Synthetic oligonucleotide"
  source: /note="Sense strand starting at position 2048 of SEQ ID NO: 2061"
acuccaguccuucgaaagu

SEQ ID NO: 4644 - RNA, 19 nt, Artificial Sequence
  source: /note="Description of Artificial Sequence: Synthetic oligonucleotide"
  source: /note="Antisense strand to SEQ ID NO: 4643"
acuuucgaaggacuggagu

SEQ ID NO: 4645 - RNA, 19 nt, Artificial Sequence
  source: /note="Description of Artificial Sequence: Synthetic oligonucleotide"
  source: /note="Sense strand starting at position 2048 of SEQ ID NO: 2092"
ggcgacuugauuuguugua

SEQ ID NO: 4646 - RNA, 19 nt, Artificial Sequence
  source: /note="Description of Artificial Sequence: Synthetic oligonucleotide"
  source: /note="Antisense strand to SEQ ID NO: 4645"
uacaacaaaucaagucgcc

SEQ ID NO: 4647 - RNA, 19 nt, Artificial Sequence
  source: /note="Description of Artificial Sequence: Synthetic oligonucleotide"
  source: /note="Sense strand starting at position 2048 of SEQ ID NO: 2093"
gcgacuugauuuguuguau

SEQ ID NO: 4648 - RNA, 19 nt, Artificial Sequence
  source: /note="Description of Artificial Sequence: Synthetic oligonucleotide"
  source: /note="Antisense strand to SEQ ID NO: 4647"
auacaacaaaucaagucgc

SEQ ID NO: 4649 - RNA, 19 nt, Artificial Sequence
  source: /note="Description of Artificial Sequence: Synthetic oligonucleotide"
  source: /note="Sense strand starting at position 2048 of SEQ ID NO: 2094"
cgacuugauuuguuguauu

SEQ ID NO: 4650 - RNA, 19 nt, Artificial Sequence
  source: /note="Description of Artificial Sequence: Synthetic oligonucleotide"
  source: /note="Antisense strand to SEQ ID NO: 4649"
aauacaacaaaucaagucg

SEQ ID NO: 4651 - RNA, 19 nt, Artificial Sequence
  source: /note="Description of Artificial Sequence: Synthetic oligonucleotide"
  source: /note="Sense strand starting at position 2048 of SEQ ID NO: 2112"
uugggucuccggugaagag

SEQ ID NO: 4652 - RNA, 19 nt, Artificial Sequence
  source: /note="Description of Artificial Sequence: Synthetic oligonucleotide"
  source: /note="Antisense strand to SEQ ID NO: 4651"
cucuucaccggagacccaa

SEQ ID NO: 4653 - RNA, 19 nt, Artificial Sequence
  source: /note="Description of Artificial Sequence: Synthetic oligonucleotide"
  source: /note="Sense strand starting at position 2048 of SEQ ID NO: 2150"
ggaaacgcaucuucugaaa

SEQ ID NO: 4654 - RNA, 19 nt, Artificial Sequence
  source: /note="Description of Artificial Sequence: Synthetic oligonucleotide"
  source: /note="Antisense strand to SEQ ID NO: 4653"
uuucagaagaugcguuucc

SEQ ID NO: 4655 - RNA, 19 nt, Artificial Sequence
  source: /note="Description of Artificial Sequence: Synthetic oligonucleotide"
  source: /note="Sense strand starting at position 2048 of SEQ ID NO: 2175"
ccugaaauuucucgauguu

SEQ ID NO: 4656 - RNA, 19 nt, Artificial Sequence
  source: /note="Description of Artificial Sequence: Synthetic oligonucleotide"
  source: /note="Antisense strand to SEQ ID NO: 4655"
aacaucgagaaauuucagg

SEQ ID NO: 4657 - RNA, 19 nt, Artificial Sequence
  source: /note="Description of Artificial Sequence: Synthetic oligonucleotide"
  source: /note="Sense strand starting at position 2048 of SEQ ID NO: 2185"
cucgauguuuaacuguuaa

SEQ ID NO: 4658 - RNA, 19 nt, Artificial Sequence
  source: /note="Description of Artificial Sequence: Synthetic oligonucleotide"
  source: /note="Antisense strand to SEQ ID NO: 4657"
uuaacaguuaaacaucgag

SEQ ID NO: 4659 - RNA, 19 nt, Artificial Sequence
  source: /note="Description of Artificial Sequence: Synthetic oligonucleotide"
  source: /note="Sense strand starting at position 2048 of SEQ ID NO: 2209"
ugcuguuguuguccacaga

SEQ ID NO: 4660 - RNA, 19 nt, Artificial Sequence
  source: /note="Description of Artificial Sequence: Synthetic oligonucleotide"
  source: /note="Antisense strand to SEQ ID NO: 4659"
ucuguggacaacaacagca

SEQ ID NO: 4661 - RNA, 19 nt, Artificial Sequence
  source: /note="Description of Artificial Sequence: Synthetic oligonucleotide"
  source: /note="Sense strand starting at position 2048 of SEQ ID NO: 2210"
gcuguuguuguccacagaa

SEQ ID NO: 4662 - RNA, 19 nt, Artificial Sequence
  source: /note="Description of Artificial Sequence: Synthetic oligonucleotide"
  source: /note="Antisense strand to SEQ ID NO: 4661"
uucuguggacaacaacagc

SEQ ID NO: 4663 - RNA, 19 nt, Artificial Sequence
  source: /note="Description of Artificial Sequence: Synthetic oligonucleotide"
  source: /note="Sense strand starting at position 2048 of SEQ ID NO: 2372"
agcuuccuuucguuguaua

SEQ ID NO: 4664 - RNA, 19 nt, Artificial Sequence
  source: /note="Description of Artificial Sequence: Synthetic oligonucleotide"
  source: /note="Antisense strand to SEQ ID NO: 4663"
uauacaacgaaaggaagcu

SEQ ID NO: 4665 - RNA, 19 nt, Artificial Sequence
  source: /note="Description of Artificial Sequence: Synthetic oligonucleotide"
  source: /note="Sense strand starting at position 2048 of SEQ ID NO: 2373"
gcuuccuuucguuguauau

SEQ ID NO: 4666 - RNA, 19 nt, Artificial Sequence
  source: /note="Description of Artificial Sequence: Synthetic oligonucleotide"
  source: /note="Antisense strand to SEQ ID NO: 4665"
auauacaacgaaaggaagc

SEQ ID NO: 4667 - RNA, 19 nt, Artificial Sequence
  source: /note="Description of Artificial Sequence: Synthetic oligonucleotide"
  source: /note="Sense strand starting at position 2048 of SEQ ID NO: 2428"
acugaucaaucaggaauuu

SEQ ID NO: 4668 - RNA, 19 nt, Artificial Sequence
  source: /note="Description of Artificial Sequence: Synthetic oligonucleotide"
  source: /note="Antisense strand to SEQ ID NO: 4667"
aaauuccugauugaucagu

SEQ ID NO: 4669 - RNA, 19 nt, Artificial Sequence
  source: /note="Description of Artificial Sequence: Synthetic oligonucleotide"
  source: /note="Sense strand starting at position 2048 of SEQ ID NO: 2501"
cccgccuuuggcugaguau

SEQ ID NO: 4670 - RNA, 19 nt, Artificial Sequence
  source: /note="Description of Artificial Sequence: Synthetic oligonucleotide"
  source: /note="Antisense strand to SEQ ID NO: 4669"
auacucagccaaaggcggg

SEQ ID NO: 4671 - RNA, 19 nt, Artificial Sequence
  source: /note="Description of Artificial Sequence: Synthetic oligonucleotide"
  source: /note="Sense strand starting at position 2048 of SEQ ID NO: 2502"
ccgccuuuggcugaguaua

SEQ ID NO: 4672 - RNA, 19 nt, Artificial Sequence
  source: /note="Description of Artificial Sequence: Synthetic oligonucleotide"
  source: /note="Antisense strand to SEQ ID NO: 4671"
uauacucagccaaaggcgg

SEQ ID NO: 4673 - RNA, 19 nt, Artificial Sequence
  source: /note="Description of Artificial Sequence: Synthetic oligonucleotide"
  source: /note="Sense strand starting at position 2048 of SEQ ID NO: 2504"
gccuuuggcugaguauaaa

SEQ ID NO: 4674 - RNA, 19 nt, Artificial Sequence
  source: /note="Description of Artificial Sequence: Synthetic oligonucleotide"
  source: /note="Antisense strand to SEQ ID NO: 4673"
uuuauacucagccaaaggc

SEQ ID NO: 4675 - RNA, 19 nt, Artificial Sequence
  source: /note="Description of Artificial Sequence: Synthetic oligonucleotide"
  source: /note="Sense strand starting at position 2048 of SEQ ID NO: 2507"
uuuggcugaguauaaacau

SEQ ID NO: 4676 - RNA, 19 nt, Artificial Sequence
  source: /note="Description of Artificial Sequence: Synthetic oligonucleotide"
  source: /note="Antisense strand to SEQ ID NO: 4675"
auguuuauacucagccaaa

SEQ ID NO: 4677 - RNA, 19 nt, Artificial Sequence
  source: /note="Description of Artificial Sequence: Synthetic oligonucleotide"
  source: /note="Sense strand starting at position 2048 of SEQ ID NO: 2552"
ggagucuggacguaaauau

SEQ ID NO: 4678 - RNA, 19 nt, Artificial Sequence
  source: /note="Description of Artificial Sequence: Synthetic oligonucleotide"
  source: /note="Antisense strand to SEQ ID NO: 4677"
auauuuacguccagacucc

SEQ ID NO: 4679 - RNA, 19 nt, Artificial Sequence
  source: /note="Description of Artificial Sequence: Synthetic oligonucleotide"
  source: /note="Sense strand starting at position 2048 of SEQ ID NO: 2559"
ggacguaaauauugauuuc

SEQ ID NO: 4680 - RNA, 19 nt, Artificial Sequence
  source: /note="Description of Artificial Sequence: Synthetic oligonucleotide"
  source: /note="Antisense strand to SEQ ID NO: 4679"
gaaaucaauauuuacgucc

SEQ ID NO: 4681 - RNA, 19 nt, Artificial Sequence
  source: /note="Description of Artificial Sequence: Synthetic oligonucleotide"
  source: /note="Sense strand starting at position 2048 of SEQ ID NO: 2612"
gcgguuuccucucccucaa

SEQ ID NO: 4682 - RNA, 19 nt, Artificial Sequence
  source: /note="Description of Artificial Sequence: Synthetic oligonucleotide"
  source: /note="Antisense strand to SEQ ID NO: 4681"
uugagggagaggaaaccgc

SEQ ID NO: 4683 - RNA, 19 nt, Artificial Sequence
  source: /note="Description of Artificial Sequence: Synthetic oligonucleotide"
  source: /note="Sense strand starting at position 2048 of SEQ ID NO: 2764"
aggcacaugugagaaacuu

SEQ ID NO: 4684 - RNA, 19 nt, Artificial Sequence
  source: /note="Description of Artificial Sequence: Synthetic oligonucleotide"
  source: /note="Antisense strand to SEQ ID NO: 4683"
aaguuucucacaugugccu

SEQ ID NO: 4685 - RNA, 19 nt, Artificial Sequence
  source: /note="Description of Artificial Sequence: Synthetic oligonucleotide"
  source: /note="Sense strand starting at position 2048 of SEQ ID NO: 2770"
augugagaaacuugccuga

SEQ ID NO: 4686 - RNA, 19 nt, Artificial Sequence
  source: /note="Description of Artificial Sequence: Synthetic oligonucleotide"
  source: /note="Antisense strand to SEQ ID NO: 4685"
ucaggcaaguuucucacau

SEQ ID NO: 4687 - RNA, 19 nt, Artificial Sequence
  source: /note="Description of Artificial Sequence: Synthetic oligonucleotide"
  source: /note="Sense strand starting at position 2048 of SEQ ID NO: 2772"
gugagaaacuugccugaac

SEQ ID NO: 4688 - RNA, 19 nt, Artificial Sequence
  source: /note="Description of Artificial Sequence: Synthetic oligonucleotide"
  source: /note="Antisense strand to SEQ ID NO: 4687"
guucaggcaaguuucucac

SEQ ID NO: 4689 - RNA, 19 nt, Artificial Sequence
  source: /note="Description of Artificial Sequence: Synthetic oligonucleotide"
  source: /note="Sense strand starting at position 2048 of SEQ ID NO: 2879"
cuaaccucucagcaggauu

SEQ ID NO: 4690 - RNA, 19 nt, Artificial Sequence
  source: /note="Description of Artificial Sequence: Synthetic oligonucleotide"
  source: /note="Antisense strand to SEQ ID NO: 4689"
aauccugcugagagguuag

SEQ ID NO: 4691 - RNA, 19 nt, Artificial Sequence
  source: /note="Description of Artificial Sequence: Synthetic oligonucleotide"
  source: /note="Sense strand starting at position 2048 of SEQ ID NO: 3265"
gcaucaugaugccucucaa

SEQ ID NO: 4692 - RNA, 19 nt, Artificial Sequence
  source: /note="Description of Artificial Sequence: Synthetic oligonucleotide"
  source: /note="Antisense strand to SEQ ID NO: 4691"
uugagaggcaucaugaugc

SEQ ID NO: 4693 - RNA, 19 nt, Artificial Sequence
  source: /note="Description of Artificial Sequence: Synthetic oligonucleotide"
  source: /note="Sense strand starting at position 2048 of SEQ ID NO: 3278"
ucucaaauugcuggcuuua

SEQ ID NO: 4694 - RNA, 19 nt, Artificial Sequence
  source: /note="Description of Artificial Sequence: Synthetic oligonucleotide"
  source: /note="Antisense strand to SEQ ID NO: 4693"
uaaagccagcaauuugaga

SEQ ID NO: 4695 - RNA, 19 nt, Artificial Sequence
  source: /note="Description of Artificial Sequence: Synthetic oligonucleotide"
  source: /note="Sense strand starting at position 2048 of SEQ ID NO: 3280"
ucaaauugcuggcuuuaca

SEQ ID NO: 4696 - RNA, 19 nt, Artificial Sequence
  source: /note="Description of Artificial Sequence: Synthetic oligonucleotide"
  source: /note="Antisense strand to SEQ ID NO: 4695"
uguaaagccagcaauuuga

SEQ ID NO: 4697 - RNA, 19 nt, Artificial Sequence
  source: /note="Description of Artificial Sequence: Synthetic oligonucleotide"
  source: /note="Sense strand starting at position 2048 of SEQ ID NO: 3378"
cggccuuggacagauaaau

SEQ ID NO: 4698 - RNA, 19 nt, Artificial Sequence
  source: /note="Description of Artificial Sequence: Synthetic oligonucleotide"
  source: /note="Antisense strand to SEQ ID NO: 4697"
auuuaucuguccaaggccg

SEQ ID NO: 4699 - RNA, 19 nt, Artificial Sequence
  source: /note="Description of Artificial Sequence: Synthetic oligonucleotide"
  source: /note="Sense strand starting at position 2048 of SEQ ID NO: 3807"
uagagaaguuuacaaggau

SEQ ID NO: 4700 - RNA, 19 nt, Artificial Sequence
  source: /note="Description of Artificial Sequence: Synthetic oligonucleotide"
  source: /note="Antisense strand to SEQ ID NO: 4699"
auccuuguaaacuucucua

SEQ ID NO: 4701 - RNA, 19 nt, Artificial Sequence
  source: /note="Description of Artificial Sequence: Synthetic oligonucleotide"
  source: /note="Sense strand starting at position 2048 of SEQ ID NO: 3840"
agcugcugcaacguuuaua

SEQ ID NO: 4702 - RNA, 19 nt, Artificial Sequence
  source: /note="Description of Artificial Sequence: Synthetic oligonucleotide"
  source: /note="Antisense strand to SEQ ID NO: 4701"
uauaaacguugcagcagcu

SEQ ID NO: 4703 - RNA, 19 nt, Artificial Sequence
  source: /note="Description of Artificial Sequence: Synthetic oligonucleotide"
  source: /note="Sense strand starting at position 2048 of SEQ ID NO: 3841"
gcugcugcaacguuuauaa

SEQ ID NO: 4704 - RNA, 19 nt, Artificial Sequence
  source: /note="Description of Artificial Sequence: Synthetic oligonucleotide"
  source: /note="Antisense strand to SEQ ID NO: 4703"
uuauaaacguugcagcagc

SEQ ID NO: 4705 - RNA, 19 nt, Artificial Sequence
  source: /note="Description of Artificial Sequence: Synthetic oligonucleotide"
  source: /note="Sense strand starting at position 2048 of SEQ ID NO: 3843"
ugcugcaacguuuauaaau

SEQ ID NO: 4706 - RNA, 19 nt, Artificial Sequence
  source: /note="Description of Artificial Sequence: Synthetic oligonucleotide"
  source: /note="Antisense strand to SEQ ID NO: 4705"
auuuauaaacguugcagca

SEQ ID NO: 4707 - RNA, 19 nt, Artificial Sequence
  source: /note="Description of Artificial Sequence: Synthetic oligonucleotide"
  source: /note="Sense strand starting at position 2048 of SEQ ID NO: 3886"
uaugccauuugcgacauua

SEQ ID NO: 4708 - RNA, 19 nt, Artificial Sequence
  source: /note="Description of Artificial Sequence: Synthetic oligonucleotide"
  source: /note="Antisense strand to SEQ ID NO: 4707"
uaaugucgcaaauggcaua

SEQ ID NO: 4709 - RNA, 19 nt, Artificial Sequence
  source: /note="Description of Artificial Sequence: Synthetic oligonucleotide"
  source: /note="Sense strand starting at position 2049 of SEQ ID NO: 312"
gcgcucagugcacgugauu

SEQ ID NO: 4710 - RNA, 19 nt, Artificial Sequence
  source: /note="Description of Artificial Sequence: Synthetic oligonucleotide"
  source: /note="Antisense strand to SEQ ID NO: 4709"
aaucacgugcacugagcgc

SEQ ID NO: 4711 - RNA, 19 nt, Artificial Sequence
  source: /note="Description of Artificial Sequence: Synthetic oligonucleotide"
  source: /note="Sense strand starting at position 2049 of SEQ ID NO: 321"
gcacgugauuucguuucau

SEQ ID NO: 4712 - RNA, 19 nt, Artificial Sequence
  source: /note="Description of Artificial Sequence: Synthetic oligonucleotide"
  source: /note="Antisense strand to SEQ ID NO: 4711"
augaaacgaaaucacgugc

SEQ ID NO: 4713 - RNA, 19 nt, Artificial Sequence
  source: /note="Description of Artificial Sequence: Synthetic oligonucleotide"
  source: /note="Sense strand starting at position 2049 of SEQ ID NO: 331"
ucguuucaucuaggguguu

SEQ ID NO: 4714 - RNA, 19 nt, Artificial Sequence
  source: /note="Description of Artificial Sequence: Synthetic oligonucleotide"
  source: /note="Antisense strand to SEQ ID NO: 4713"
aacacccuagaugaaacga

SEQ ID NO: 4715 - RNA, 19 nt, Artificial Sequence
  source: /note="Description of Artificial Sequence: Synthetic oligonucleotide"
  source: /note="Sense strand starting at position 2049 of SEQ ID NO: 388"
gcagaacugucucauccuc

SEQ ID NO: 4716 - RNA, 19 nt, Artificial Sequence
  source: /note="Description of Artificial Sequence: Synthetic oligonucleotide"
  source: /note="Antisense strand to SEQ ID NO: 4715"
gaggaugagacaguucugc

SEQ ID NO: 4717 - RNA, 19 nt, Artificial Sequence
  source: /note="Description of Artificial Sequence: Synthetic oligonucleotide"
  source: /note="Sense strand starting at position 2049 of SEQ ID NO: 421"
ucuagcgguuccgagugaa

SEQ ID NO: 4718 - RNA, 19 nt, Artificial Sequence
  source: /note="Description of Artificial Sequence: Synthetic oligonucleotide"
  source: /note="Antisense strand to SEQ ID NO: 4717"
uucacucggaaccgcuaga

SEQ ID NO: 4719 - RNA, 19 nt, Artificial Sequence
  source: /note="Description of Artificial Sequence: Synthetic oligonucleotide"
  source: /note="Sense strand starting at position 2049 of SEQ ID NO: 424"
agcgguuccgagugaaaga

SEQ ID NO: 4720 - RNA, 19 nt, Artificial Sequence
  source: /note="Description of Artificial Sequence: Synthetic oligonucleotide"
  source: /note="Antisense strand to SEQ ID NO: 4719"
ucuuucacucggaaccgcu

SEQ ID NO: 4721 - RNA, 19 nt, Artificial Sequence
  source: /note="Description of Artificial Sequence: Synthetic oligonucleotide"
  source: /note="Sense strand starting at position 2049 of SEQ ID NO: 706"
uuaauuaacgcggagccua

SEQ ID NO: 4722 - RNA, 19 nt, Artificial Sequence
  source: /note="Description of Artificial Sequence: Synthetic oligonucleotide"
  source: /note="Antisense strand to SEQ ID NO: 4721"
uaggcuccgcguuaauuaa

SEQ ID NO: 4723 - RNA, 19 nt, Artificial Sequence
  source: /note="Description of Artificial Sequence: Synthetic oligonucleotide"
  source: /note="Sense strand starting at position 2049 of SEQ ID NO: 791"
cuugcccauggcugaaauu

SEQ ID NO: 4724 - RNA, 19 nt, Artificial Sequence
  source: /note="Description of Artificial Sequence: Synthetic oligonucleotide"
  source: /note="Antisense strand to SEQ ID NO: 4723"
aauuucagccaugggcaag

SEQ ID NO: 4725 - RNA, 19 nt, Artificial Sequence
  source: /note="Description of Artificial Sequence: Synthetic oligonucleotide"
  source: /note="Sense strand starting at position 2049 of SEQ ID NO: 864"
ucgggucucggaugcuauu

SEQ ID NO: 4726 - RNA, 19 nt, Artificial Sequence
  source: /note="Description of Artificial Sequence: Synthetic oligonucleotide"
  source: /note="Antisense strand to SEQ ID NO: 4725"
aauagcauccgagacccga

SEQ ID NO: 4727 - RNA, 19 nt, Artificial Sequence
  source: /note="Description of Artificial Sequence: Synthetic oligonucleotide"
  source: /note="Sense strand starting at position 2049 of SEQ ID NO: 921"
gucgaucagcuccgagauu

SEQ ID NO: 4728 - RNA, 19 nt, Artificial Sequence
  source: /note="Description of Artificial Sequence: Synthetic oligonucleotide"
  source: /note="Antisense strand to SEQ ID NO: 4727"
aaucucggagcugaucgac

SEQ ID NO: 4729 - RNA, 19 nt, Artificial Sequence
  source: /note="Description of Artificial Sequence: Synthetic oligonucleotide"
  source: /note="Sense strand starting at position 2049 of SEQ ID NO: 922"
ucgaucagcuccgagauua

SEQ ID NO: 4730 - RNA, 19 nt, Artificial Sequence
  source: /note="Description of Artificial Sequence: Synthetic oligonucleotide"
  source: /note="Antisense strand to SEQ ID NO: 4729"
uaaucucggagcugaucga

SEQ ID NO: 4731 - RNA, 19 nt, Artificial Sequence
  source: /note="Description of Artificial Sequence: Synthetic oligonucleotide"
  source: /note="Sense strand starting at position 2049 of SEQ ID NO: 1050"
ggcggcuuguuggauuuau

SEQ ID NO: 4732 - RNA, 19 nt, Artificial Sequence
  source: /note="Description of Artificial Sequence: Synthetic oligonucleotide"
  source: /note="Antisense strand to SEQ ID NO: 4731"
auaaauccaacaagccgcc

SEQ ID NO: 4733 - RNA, 19 nt, Artificial Sequence
  source: /note="Description of Artificial Sequence: Synthetic oligonucleotide"
  source: /note="Sense strand starting at position 2049 of SEQ ID NO: 1114"
ggcucaauuuaguguauga

SEQ ID NO: 4734 - RNA, 19 nt, Artificial Sequence
  source: /note="Description of Artificial Sequence: Synthetic oligonucleotide"
  source: /note="Antisense strand to SEQ ID NO: 4733"
ucauacacuaaauugagcc

SEQ ID NO: 4735 - RNA, 19 nt, Artificial Sequence
  source: /note="Description of Artificial Sequence: Synthetic oligonucleotide"
  source: /note="Sense strand starting at position 2049 of SEQ ID NO: 1282"
uuuggaaguucuccuccau

SEQ ID NO: 4736 - RNA, 19 nt, Artificial Sequence
  source: /note="Description of Artificial Sequence: Synthetic oligonucleotide"
  source: /note="Antisense strand to SEQ ID NO: 4735"
auggaggagaacuuccaaa

SEQ ID NO: 4737 - RNA, 19 nt, Artificial Sequence
  source: /note="Description of Artificial Sequence: Synthetic oligonucleotide"
  source: /note="Sense strand starting at position 2049 of SEQ ID NO: 1351"
gaagaaacgaugcgucuga

SEQ ID NO: 4738 - RNA, 19 nt, Artificial Sequence
  source: /note="Description of Artificial Sequence: Synthetic oligonucleotide"
  source: /note="Antisense strand to SEQ ID NO: 4737"
ucagacgcaucguuucuuc

SEQ ID NO: 4739 - RNA, 19 nt, Artificial Sequence
  source: /note="Description of Artificial Sequence: Synthetic oligonucleotide"
  source: /note="Sense strand starting at position 2049 of SEQ ID NO: 1405"
ccgcacuccugggaaagaa

SEQ ID NO: 4740 - RNA, 19 nt, Artificial Sequence
  source: /note="Description of Artificial Sequence: Synthetic oligonucleotide"
  source: /note="Antisense strand to SEQ ID NO: 4739"
uucuuucccaggagugcgg

SEQ ID NO: 4741 - RNA, 19 nt, Artificial Sequence
  source: /note="Description of Artificial Sequence: Synthetic oligonucleotide"
  source: /note="Sense strand starting at position 2049 of SEQ ID NO: 1497"
agagaucagucacagcgaa

SEQ ID NO: 4742 - RNA, 19 nt, Artificial Sequence
  source: /note="Description of Artificial Sequence: Synthetic oligonucleotide"
  source: /note="Antisense strand to SEQ ID NO: 4741"
uucgcugugacugaucucu

SEQ ID NO: 4743 - RNA, 19 nt, Artificial Sequence
  source: /note="Description of Artificial Sequence: Synthetic oligonucleotide"
  source: /note="Sense strand starting at position 2049 of SEQ ID NO: 1511"
gcgaacugcucuggcugau

SEQ ID NO: 4744 - RNA, 19 nt, Artificial Sequence
  source: /note="Description of Artificial Sequence: Synthetic oligonucleotide"
  source: /note="Antisense strand to SEQ ID NO: 4743"
aucagccagagcaguucgc

SEQ ID NO: 4745 - RNA, 19 nt, Artificial Sequence
  source: /note="Description of Artificial Sequence: Synthetic oligonucleotide"
  source: /note="Sense strand starting at position 2049 of SEQ ID NO: 1517"
ugcucuggcugaucugauu

SEQ ID NO: 4746 - RNA, 19 nt, Artificial Sequence
  source: /note="Description of Artificial Sequence: Synthetic oligonucleotide"
  source: /note="Antisense strand to SEQ ID NO: 4745"
aaucagaucagccagagca

SEQ ID NO: 4747 - RNA, 19 nt, Artificial Sequence
  source: /note="Description of Artificial Sequence: Synthetic oligonucleotide"
  source: /note="Sense strand starting at position 2049 of SEQ ID NO: 2030"
ggcucacucuuggaugcau

SEQ ID NO: 4748 - RNA, 19 nt, Artificial Sequence
  source: /note="Description of Artificial Sequence: Synthetic oligonucleotide"
  source: /note="Antisense strand to SEQ ID NO: 4747"
augcauccaagagugagcc

SEQ ID NO: 4749 - RNA, 19 nt, Artificial Sequence
  source: /note="Description of Artificial Sequence: Synthetic oligonucleotide"
  source: /note="Sense strand starting at position 2049 of SEQ ID NO: 2858"
gcuguuuagcgccaguaga

SEQ ID NO: 4750 - RNA, 19 nt, Artificial Sequence
  source: /note="Description of Artificial Sequence: Synthetic oligonucleotide"
  source: /note="Antisense strand to SEQ ID NO: 4749"
ucuacuggcgcuaaacagc

SEQ ID NO: 4751 - RNA, 19 nt, Artificial Sequence
  source: /note="Description of Artificial Sequence: Synthetic oligonucleotide"
  source: /note="Sense strand starting at position 2049 of SEQ ID NO: 3001"
gccuaagaaucaugcucuu

SEQ ID NO: 4752 - RNA, 19 nt, Artificial Sequence
  source: /note="Description of Artificial Sequence: Synthetic oligonucleotide"
  source: /note="Antisense strand to SEQ ID NO: 4751"
aagagcaugauucuuaggc

SEQ ID NO: 4753 - RNA, 19 nt, Artificial Sequence
  source: /note="Description of Artificial Sequence: Synthetic oligonucleotide"
  source: /note="Sense strand starting at position 2049 of SEQ ID NO: 3007"
gaaucaugcucuugggaga

SEQ ID NO: 4754 - RNA, 19 nt, Artificial Sequence
  source: /note="Description of Artificial Sequence: Synthetic oligonucleotide"
  source: /note="Antisense strand to SEQ ID NO: 4753"
ucucccaagagcaugauuc

SEQ ID NO: 4755 - RNA, 19 nt, Artificial Sequence
  source: /note="Description of Artificial Sequence: Synthetic oligonucleotide"
  source: /note="Sense strand starting at position 2049 of SEQ ID NO: 3128"
ugugaauuaucugcaccuc

SEQ ID NO: 4756 - RNA, 19 nt, Artificial Sequence
  source: /note="Description of Artificial Sequence: Synthetic oligonucleotide"
  source: /note="Antisense strand to SEQ ID NO: 4755"
gaggugcagauaauucaca

SEQ ID NO: 4757 - RNA, 19 nt, Artificial Sequence
  source: /note="Description of Artificial Sequence: Synthetic oligonucleotide"
  source: /note="Sense strand starting at position 2049 of SEQ ID NO: 3200"
gccuuauccgucuguauag

SEQ ID NO: 4758 - RNA, 19 nt, Artificial Sequence
  source: /note="Description of Artificial Sequence: Synthetic oligonucleotide"
  source: /note="Antisense strand to SEQ ID NO: 4757"
cuauacagacggauaaggc

SEQ ID NO: 4759 - RNA, 19 nt, Artificial Sequence
  source: /note="Description of Artificial Sequence: Synthetic oligonucleotide"
  source: /note="Sense strand starting at position 2049 of SEQ ID NO: 3211"
cuguauagcccaggaggua

SEQ ID NO: 4760 - RNA, 19 nt, Artificial Sequence
  source: /note="Description of Artificial Sequence: Synthetic oligonucleotide"
  source: /note="Antisense strand to SEQ ID NO: 4759"
uaccuccugggcuauacag

SEQ ID NO: 4761 - RNA, 19 nt, Artificial Sequence
  source: /note="Description of Artificial Sequence: Synthetic oligonucleotide"
  source: /note="Sense strand starting at position 2049 of SEQ ID NO: 3281"
gcuagcguuuaucguuuau

SEQ ID NO: 4762 - RNA, 19 nt, Artificial Sequence
  source: /note="Description of Artificial Sequence: Synthetic oligonucleotide"
  source: /note="Antisense strand to SEQ ID NO: 4761"
auaaacgauaaacgcuagc

SEQ ID NO: 4763 - RNA, 19 nt, Artificial Sequence
  source: /note="Description of Artificial Sequence: Synthetic oligonucleotide"
  source: /note="Sense strand starting at position 2049 of SEQ ID NO: 3283"
uagcguuuaucguuuauuu

SEQ ID NO: 4764 - RNA, 19 nt, Artificial Sequence
  source: /note="Description of Artificial Sequence: Synthetic oligonucleotide"
  source: /note="Antisense strand to SEQ ID NO: 4763"
aaauaaacgauaaacgcua

SEQ ID NO: 4765 - RNA, 19 nt, Artificial Sequence
  source: /note="Description of Artificial Sequence: Synthetic oligonucleotide"
  source: /note="Sense strand starting at position 2049 of SEQ ID NO: 3303"
gugccagcuuuguuacaca

SEQ ID NO: 4766 - RNA, 19 nt, Artificial Sequence
  source: /note="Description of Artificial Sequence: Synthetic oligonucleotide"
  source: /note="Antisense strand to SEQ ID NO: 4765"
uguguaacaaagcuggcac

SEQ ID NO: 4767 - RNA, 19 nt, Artificial Sequence
  source: /note="Description of Artificial Sequence: Synthetic oligonucleotide"
  source: /note="Sense strand starting at position 2049 of SEQ ID NO: 3360"
ggagacaauuguuguccca

SEQ ID NO: 4768 - RNA, 19 nt, Artificial Sequence
  source: /note="Description of Artificial Sequence: Synthetic oligonucleotide"
  source: /note="Antisense strand to SEQ ID NO: 4767"
ugggacaacaauugucucc

SEQ ID NO: 4769 - RNA, 19 nt, Artificial Sequence
  source: /note="Description of Artificial Sequence: Synthetic oligonucleotide"
  source: /note="Sense strand starting at position 2049 of SEQ ID NO: 3373"
gucccaaucuuacaguuga

SEQ ID NO: 4770 - RNA, 19 nt, Artificial Sequence
  source: /note="Description of Artificial Sequence: Synthetic oligonucleotide"
  source: /note="Antisense strand to SEQ ID NO: 4769"
ucaacuguaagauugggac

SEQ ID NO: 4771 - RNA, 19 nt, Artificial Sequence
  source: /note="Description of Artificial Sequence: Synthetic oligonucleotide"
  source: /note="Sense strand starting at position 2049 of SEQ ID NO: 3380"
ucuuacaguugagggaaau

SEQ ID NO: 4772 - RNA, 19 nt, Artificial Sequence
  source: /note="Description of Artificial Sequence: Synthetic oligonucleotide"
  source: /note="Antisense strand to SEQ ID NO: 4771"
auuucccucaacuguaaga

SEQ ID NO: 4773 - RNA, 19 nt, Artificial Sequence
  source: /note="Description of Artificial Sequence: Synthetic oligonucleotide"
  source: /note="Sense strand starting at position 2049 of SEQ ID NO: 3433"
ugaauaccaugggaagguu

SEQ ID NO: 4774 - RNA, 19 nt, Artificial Sequence
  source: /note="Description of Artificial Sequence: Synthetic oligonucleotide"
  source: /note="Antisense strand to SEQ ID NO: 4773"
aaccuucccaugguauuca

SEQ ID NO: 4775 - RNA, 19 nt, Artificial Sequence
  source: /note="Description of Artificial Sequence: Synthetic oligonucleotide"
  source: /note="Sense strand starting at position 2049 of SEQ ID NO: 3524"
ggccguuugacauggugaa

SEQ ID NO: 4776 - RNA, 19 nt, Artificial Sequence
  source: /note="Description of Artificial Sequence: Synthetic oligonucleotide"
  source: /note="Antisense strand to SEQ ID NO: 4775"
uucaccaugucaaacggcc

SEQ ID NO: 4777 - RNA, 19 nt, Artificial Sequence
  source: /note="Description of Artificial Sequence: Synthetic oligonucleotide"
  source: /note="Sense strand starting at position 2049 of SEQ ID NO: 3525"
gccguuugacauggugaac

SEQ ID NO: 4778 - RNA, 19 nt, Artificial Sequence
  source: /note="Description of Artificial Sequence: Synthetic oligonucleotide"
  source: /note="Antisense strand to SEQ ID NO: 4777"
guucaccaugucaaacggc

SEQ ID NO: 4779 - RNA, 19 nt, Artificial Sequence
  source: /note="Description of Artificial Sequence: Synthetic oligonucleotide"
  source: /note="Sense strand starting at position 2049 of SEQ ID NO: 3633"
ggcagcaacuugcucuaau

SEQ ID NO: 4780 - RNA, 19 nt, Artificial Sequence
  source: /note="Description of Artificial Sequence: Synthetic oligonucleotide"
  source: /note="Antisense strand to SEQ ID NO: 4779"
auuagagcaaguugcugcc

SEQ ID NO: 4781 - RNA, 19 nt, Artificial Sequence
  source: /note="Description of Artificial Sequence: Synthetic oligonucleotide"
  source: /note="Sense strand starting at position 2049 of SEQ ID NO: 3634"
gcagcaacuugcucuaaug

SEQ ID NO: 4782 - RNA, 19 nt, Artificial Sequence
  source: /note="Description of Artificial Sequence: Synthetic oligonucleotide"
  source: /note="Antisense strand to SEQ ID NO: 4781"
cauuagagcaaguugcugc

SEQ ID NO: 4783 - RNA, 19 nt, Artificial Sequence
  source: /note="Description of Artificial Sequence: Synthetic oligonucleotide"
  source: /note="Sense strand starting at position 2049 of SEQ ID NO: 3644"
gcucuaaugugcuuaggag

SEQ ID NO: 4784 - RNA, 19 nt, Artificial Sequence
  source: /note="Description of Artificial Sequence: Synthetic oligonucleotide"
  source: /note="Antisense strand to SEQ ID NO: 4783"
cuccuaagcacauuagagc

SEQ ID NO: 4785 - RNA, 19 nt, Artificial Sequence
  source: /note="Description of Artificial Sequence: Synthetic oligonucleotide"
  source: /note="Sense strand starting at position 2049 of SEQ ID NO: 3764"
caaagaggcuaauacguua

SEQ ID NO: 4786 - RNA, 19 nt, Artificial Sequence
  source: /note="Description of Artificial Sequence: Synthetic oligonucleotide"
  source: /note="Antisense strand to SEQ ID NO: 4785"
uaacguauuagccucuuug

SEQ ID NO: 4787 - RNA, 19 nt, Artificial Sequence
  source: /note="Description of Artificial Sequence: Synthetic oligonucleotide"
  source: /note="Sense strand starting at position 2049 of SEQ ID NO: 3767"
agaggcuaauacguuauau

SEQ ID NO: 4788 - RNA, 19 nt, Artificial Sequence
  source: /note="Description of Artificial Sequence: Synthetic oligonucleotide"
  source: /note="Antisense strand to SEQ ID NO: 4787"
auauaacguauuagccucu

SEQ ID NO: 4789 - RNA, 19 nt, Artificial Sequence
  source: /note="Description of Artificial Sequence: Synthetic oligonucleotide"
  source: /note="Sense strand starting at position 2049 of SEQ ID NO: 3771"
gcuaauacguuauauucga

SEQ ID NO: 4790 - RNA, 19 nt, Artificial Sequence
  source: /note="Description of Artificial Sequence: Synthetic oligonucleotide"
  source: /note="Antisense strand to SEQ ID NO: 4789"
ucgaauauaacguauuagc

SEQ ID NO: 4791 - RNA, 19 nt, Artificial Sequence
  source: /note="Description of Artificial Sequence: Synthetic oligonucleotide"
  source: /note="Sense strand starting at position 2049 of SEQ ID NO: 3776"
uacguuauauucgaaugcu

SEQ ID NO: 4792 - RNA, 19 nt, Artificial Sequence
  source: /note="Description of Artificial Sequence: Synthetic oligonucleotide"
  source: /note="Antisense strand to SEQ ID NO: 4791"
agcauucgaauauaacgua

SEQ ID NO: 4793 - RNA, 19 nt, Artificial Sequence
  source: /note="Description of Artificial Sequence: Synthetic oligonucleotide"
  source: /note="Sense strand starting at position 2049 of SEQ ID NO: 3779"
guuauauucgaaugcugcu

SEQ ID NO: 4794 - RNA, 19 nt, Artificial Sequence
  source: /note="Description of Artificial Sequence: Synthetic oligonucleotide"
  source: /note="Antisense strand to SEQ ID NO: 4793"
agcagcauucgaauauaac

SEQ ID NO: 4795 - RNA, 19 nt, Artificial Sequence
  source: /note="Description of Artificial Sequence: Synthetic oligonucleotide"
  source: /note="Sense strand starting at position 2049 of SEQ ID NO: 3782"
auauucgaaugcugcuuua

SEQ ID NO: 4796 - RNA, 19 nt, Artificial Sequence
  source: /note="Description of Artificial Sequence: Synthetic oligonucleotide"
  source: /note="Antisense strand to SEQ ID NO: 4795"
uaaagcagcauucgaauau

SEQ ID NO: 4797 - RNA, 19 nt, Artificial Sequence
  source: /note="Description of Artificial Sequence: Synthetic oligonucleotide"
  source: /note="Sense strand starting at position 2049 of SEQ ID NO: 3824"
uugcuugaucuuuacagca

SEQ ID NO: 4798 - RNA, 19 nt, Artificial Sequence
  source: /note="Description of Artificial Sequence: Synthetic oligonucleotide"
  source: /note="Antisense strand to SEQ ID NO: 4797"
ugcuguaaagaucaagcaa

SEQ ID NO: 4799 - RNA, 19 nt, Artificial Sequence
  source: /note="Description of Artificial Sequence: Synthetic oligonucleotide"
  source: /note="Sense strand starting at position 2049 of SEQ ID NO: 3826"
gcuugaucuuuacagcaaa

SEQ ID NO: 4800 - RNA, 19 nt, Artificial Sequence
  source: /note="Description of Artificial Sequence: Synthetic oligonucleotide"
  source: /note="Antisense strand to SEQ ID NO: 4799"
uuugcuguaaagaucaagc

SEQ ID NO: 4801 - RNA, 19 nt, Artificial Sequence
  source: /note="Description of Artificial Sequence: Synthetic oligonucleotide"
  source: /note="Sense strand starting at position 2049 of SEQ ID NO: 3882"
agaugaaucuuuggagcuu

SEQ ID NO: 4802 - RNA, 19 nt, Artificial Sequence
  source: /note="Description of Artificial Sequence: Synthetic oligonucleotide"
  source: /note="Antisense strand to SEQ ID NO: 4801"
aagcuccaaagauucaucu

SEQ ID NO: 4803 - RNA, 19 nt, Artificial Sequence
  source: /note="Description of Artificial Sequence: Synthetic oligonucleotide"
  source: /note="Sense strand starting at position 2049 of SEQ ID NO: 3883"
gaugaaucuuuggagcuua

SEQ ID NO: 4804 - RNA, 19 nt, Artificial Sequence
  source: /note="Description of Artificial Sequence: Synthetic oligonucleotide"
  source: /note="Antisense strand to SEQ ID NO: 4803"
uaagcuccaaagauucauc

SEQ ID NO: 4805 - RNA, 19 nt, Artificial Sequence
  source: /note="Description of Artificial Sequence: Synthetic oligonucleotide"
  source: /note="Sense strand starting at position 2049 of SEQ ID NO: 3919"
cccugauguugcccagaug

SEQ ID NO: 4806 - RNA, 19 nt, Artificial Sequence
  source: /note="Description of Artificial Sequence: Synthetic oligonucleotide"
  source: /note="Antisense strand to SEQ ID NO: 4805"
caucugggcaacaucaggg

SEQ ID NO: 4807 - RNA, 19 nt, Artificial Sequence
  source: /note="Description of Artificial Sequence: Synthetic oligonucleotide"
  source: /note="Sense strand starting at position 2049 of SEQ ID NO: 3941"
aguggcaugucuccuaaca

SEQ ID NO: 4808 - RNA, 19 nt, Artificial Sequence
  source: /note="Description of Artificial Sequence: Synthetic oligonucleotide"
  source: /note="Antisense strand to SEQ ID NO: 4807"
uguuaggagacaugccacu

SEQ ID NO: 4809 - RNA, 19 nt, Artificial Sequence
  source: /note="Description of Artificial Sequence: Synthetic oligonucleotide"
  source: /note="Sense strand starting at position 2050 of SEQ ID NO: 232"
uuaauuaacgcggagccua

SEQ ID NO: 4810 - RNA, 19 nt, Artificial Sequence
  source: /note="Description of Artificial Sequence: Synthetic oligonucleotide"
  source: /note="Antisense strand to SEQ ID NO: 4809"
uaggcuccgcguuaauuaa

SEQ ID NO: 4811 - RNA, 19 nt, Artificial Sequence
  source: /note="Description of Artificial Sequence: Synthetic oligonucleotide"
  source: /note="Sense strand starting at position 2050 of SEQ ID NO: 317"
cuugcccauggcugaaauu

SEQ ID NO: 4812 - RNA, 19 nt, Artificial Sequence
  source: /note="Description of Artificial Sequence: Synthetic oligonucleotide"
  source: /note="Antisense strand to SEQ ID NO: 4811"
aauuucagccaugggcaag

SEQ ID NO: 4813 - RNA, 19 nt, Artificial Sequence
  source: /note="Description of Artificial Sequence: Synthetic oligonucleotide"
  source: /note="Sense strand starting at position 2050 of SEQ ID NO: 390"
ucgggucucggaugcuauu

SEQ ID NO: 4814 - RNA, 19 nt, Artificial Sequence
  source: /note="Description of Artificial Sequence: Synthetic oligonucleotide"
  source: /note="Antisense strand to SEQ ID NO: 4813"
aauagcauccgagacccga

SEQ ID NO: 4815 - RNA, 19 nt, Artificial Sequence
  source: /note="Description of Artificial Sequence: Synthetic oligonucleotide"
  source: /note="Sense strand starting at position 2050 of SEQ ID NO: 447"
gucgaucagcuccgagauu

SEQ ID NO: 4816 - RNA, 19 nt, Artificial Sequence
  source: /note="Description of Artificial Sequence: Synthetic oligonucleotide"
  source: /note="Antisense strand to SEQ ID NO: 4815"
aaucucggagcugaucgac

SEQ ID NO: 4817 - RNA, 19 nt, Artificial Sequence
  source: /note="Description of Artificial Sequence: Synthetic oligonucleotide"
  source: /note="Sense strand starting at position 2050 of SEQ ID NO: 448"
ucgaucagcuccgagauua

SEQ ID NO: 4818 - RNA, 19 nt, Artificial Sequence
  source: /note="Description of Artificial Sequence: Synthetic oligonucleotide"
  source: /note="Antisense strand to SEQ ID NO: 4817"
uaaucucggagcugaucga

SEQ ID NO: 4819 - RNA, 19 nt, Artificial Sequence
  source: /note="Description of Artificial Sequence: Synthetic oligonucleotide"
  source: /note="Sense strand starting at position 2050 of SEQ ID NO: 576"
ggcggcuuguuggauuuau

SEQ ID NO: 4820 - RNA, 19 nt, Artificial Sequence
  source: /note="Description of Artificial Sequence: Synthetic oligonucleotide"
  source: /note="Antisense strand to SEQ ID NO: 4819"
auaaauccaacaagccgcc

SEQ ID NO: 4821 - RNA, 19 nt, Artificial Sequence
  source: /note="Description of Artificial Sequence: Synthetic oligonucleotide"
  source: /note="Sense strand starting at position 2050 of SEQ ID NO: 640"
ggcucaauuuaguguauga

SEQ ID NO: 4822 - RNA, 19 nt, Artificial Sequence
  source: /note="Description of Artificial Sequence: Synthetic oligonucleotide"
  source: /note="Antisense strand to SEQ ID NO: 4821"
ucauacacuaaauugagcc

SEQ ID NO: 4823 - RNA, 19 nt, Artificial Sequence
  source: /note="Description of Artificial Sequence: Synthetic oligonucleotide"
  source: /note="Sense strand starting at position 2050 of SEQ ID NO: 808"
uuuggaaguucuccuccau

SEQ ID NO: 4824 - RNA, 19 nt, Artificial Sequence
  source: /note="Description of Artificial Sequence: Synthetic oligonucleotide"
  source: /note="Antisense strand to SEQ ID NO: 4823"
auggaggagaacuuccaaa

SEQ ID NO: 4825 - RNA, 19 nt, Artificial Sequence
  source: /note="Description of Artificial Sequence: Synthetic oligonucleotide"
  source: /note="Sense strand starting at position 2050 of SEQ ID NO: 877"
gaagaaacgaugcgucuga

SEQ ID NO: 4826 - RNA, 19 nt, Artificial Sequence
  source: /note="Description of Artificial Sequence: Synthetic oligonucleotide"
  source: /note="Antisense strand to SEQ ID NO: 4825"
ucagacgcaucguuucuuc

SEQ ID NO: 4827 - RNA, 19 nt, Artificial Sequence
  source: /note="Description of Artificial Sequence: Synthetic oligonucleotide"
  source: /note="Sense strand starting at position 2050 of SEQ ID NO: 931"
ccgcacuccugggaaagaa

SEQ ID NO: 4828 - RNA, 19 nt, Artificial Sequence
  source: /note="Description of Artificial Sequence: Synthetic oligonucleotide"
  source: /note="Antisense strand to SEQ ID NO: 4827"
uucuuucccaggagugcgg

SEQ ID NO: 4829 - RNA, 19 nt, Artificial Sequence
  source: /note="Description of Artificial Sequence: Synthetic oligonucleotide"
  source: /note="Sense strand starting at position 2050 of SEQ ID NO: 1023"
agagaucagucacagcgaa

SEQ ID NO: 4830 - RNA, 19 nt, Artificial Sequence
  source: /note="Description of Artificial Sequence: Synthetic oligonucleotide"
  source: /note="Antisense strand to SEQ ID NO: 4829"
uucgcugugacugaucucu

SEQ ID NO: 4831 - RNA, 19 nt, Artificial Sequence
  source: /note="Description of Artificial Sequence: Synthetic oligonucleotide"
  source: /note="Sense strand starting at position 2050 of SEQ ID NO: 1037"
gcgaacugcucuggcugau

SEQ ID NO: 4832 - RNA, 19 nt, Artificial Sequence
  source: /note="Description of Artificial Sequence: Synthetic oligonucleotide"
  source: /note="Antisense strand to SEQ ID NO: 4831"
aucagccagagcaguucgc

SEQ ID NO: 4833 - RNA, 19 nt, Artificial Sequence
  source: /note="Description of Artificial Sequence: Synthetic oligonucleotide"
  source: /note="Sense strand starting at position 2050 of SEQ ID NO: 1043"
ugcucuggcugaucugauu

SEQ ID NO: 4834 - RNA, 19 nt, Artificial Sequence
  source: /note="Description of Artificial Sequence: Synthetic oligonucleotide"
  source: /note="Antisense strand to SEQ ID NO: 4833"
aaucagaucagccagagca

SEQ ID NO: 4835 - RNA, 19 nt, Artificial Sequence
  source: /note="Description of Artificial Sequence: Synthetic oligonucleotide"
  source: /note="Sense strand starting at position 2050 of SEQ ID NO: 1556"
ggcucacucuuggaugcau

SEQ ID NO: 4836 - RNA, 19 nt, Artificial Sequence
  source: /note="Description of Artificial Sequence: Synthetic oligonucleotide"
  source: /note="Antisense strand to SEQ ID NO: 4835"
augcauccaagagugagcc

SEQ ID NO: 4837 - RNA, 19 nt, Artificial Sequence
  source: /note="Description of Artificial Sequence: Synthetic oligonucleotide"
  source: /note="Sense strand starting at position 2050 of SEQ ID NO: 2384"
gcuguuuagcgccaguaga

SEQ ID NO: 4838 - RNA, 19 nt, Artificial Sequence
  source: /note="Description of Artificial Sequence: Synthetic oligonucleotide"
  source: /note="Antisense strand to SEQ ID NO: 4837"
ucuacuggcgcuaaacagc

SEQ ID NO: 4839 - RNA, 19 nt, Artificial Sequence
  source: /note="Description of Artificial Sequence: Synthetic oligonucleotide"
  source: /note="Sense strand starting at position 2050 of SEQ ID NO: 2527"
gccuaagaaucaugcucuu

SEQ ID NO: 4840 - RNA, 19 nt, Artificial Sequence
  source: /note="Description of Artificial Sequence: Synthetic oligonucleotide"
  source: /note="Antisense strand to SEQ ID NO: 4839"
aagagcaugauucuuaggc

SEQ ID NO: 4841 - RNA, 19 nt, Artificial Sequence
  source: /note="Description of Artificial Sequence: Synthetic oligonucleotide"
  source: /note="Sense strand starting at position 2050 of SEQ ID NO: 2533"
gaaucaugcucuugggaga

SEQ ID NO: 4842 - RNA, 19 nt, Artificial Sequence
  source: /note="Description of Artificial Sequence: Synthetic oligonucleotide"
  source: /note="Antisense strand to SEQ ID NO: 4841"
ucucccaagagcaugauuc

SEQ ID NO: 4843 - RNA, 19 nt, Artificial Sequence
  source: /note="Description of Artificial Sequence: Synthetic oligonucleotide"
  source: /note="Sense strand starting at position 2050 of SEQ ID NO: 2654"
ugugaauuaucugcaccuc

SEQ ID NO: 4844 - RNA, 19 nt, Artificial Sequence
  source: /note="Description of Artificial Sequence: Synthetic oligonucleotide"
  source: /note="Antisense strand to SEQ ID NO: 4843"
gaggugcagauaauucaca

SEQ ID NO: 4845 - RNA, 19 nt, Artificial Sequence
  source: /note="Description of Artificial Sequence: Synthetic oligonucleotide"
  source: /note="Sense strand starting at position 2050 of SEQ ID NO: 2726"
gccuuauccgucuguauag

SEQ ID NO: 4846 - RNA, 19 nt, Artificial Sequence
  source: /note="Description of Artificial Sequence: Synthetic oligonucleotide"
  source: /note="Antisense strand to SEQ ID NO: 4845"
cuauacagacggauaaggc

SEQ ID NO: 4847 - RNA, 19 nt, Artificial Sequence
  source: /note="Description of Artificial Sequence: Synthetic oligonucleotide"
  source: /note="Sense strand starting at position 2050 of SEQ ID NO: 2737"
cuguauagcccaggaggua

SEQ ID NO: 4848 - RNA, 19 nt, Artificial Sequence
  source: /note="Description of Artificial Sequence: Synthetic oligonucleotide"
  source: /note="Antisense strand to SEQ ID NO: 4847"
uaccuccugggcuauacag

SEQ ID NO: 4849 - RNA, 19 nt, Artificial Sequence
  source: /note="Description of Artificial Sequence: Synthetic oligonucleotide"
  source: /note="Sense strand starting at position 2050 of SEQ ID NO: 2807"
gcuagcguuuaucguuuau

SEQ ID NO: 4850 - RNA, 19 nt, Artificial Sequence
  source: /note="Description of Artificial Sequence: Synthetic oligonucleotide"
  source: /note="Antisense strand to SEQ ID NO: 4849"
auaaacgauaaacgcuagc

SEQ ID NO: 4851 - RNA, 19 nt, Artificial Sequence
  source: /note="Description of Artificial Sequence: Synthetic oligonucleotide"
  source: /note="Sense strand starting at position 2050 of SEQ ID NO: 2809"
uagcguuuaucguuuauuu

SEQ ID NO: 4852 - RNA, 19 nt, Artificial Sequence
  source: /note="Description of Artificial Sequence: Synthetic oligonucleotide"
  source: /note="Antisense strand to SEQ ID NO: 4851"
aaauaaacgauaaacgcua

SEQ ID NO: 4853 - RNA, 19 nt, Artificial Sequence
  source: /note="Description of Artificial Sequence: Synthetic oligonucleotide"
  source: /note="Sense strand starting at position 2050 of SEQ ID NO: 2829"
gugccagcuuuguuacaca

SEQ ID NO: 4854 - RNA, 19 nt, Artificial Sequence
  source: /note="Description of Artificial Sequence: Synthetic oligonucleotide"
  source: /note="Antisense strand to SEQ ID NO: 4853"
uguguaacaaagcuggcac

SEQ ID NO: 4855 - RNA, 19 nt, Artificial Sequence
  source: /note="Description of Artificial Sequence: Synthetic oligonucleotide"
  source: /note="Sense strand starting at position 2050 of SEQ ID NO: 2886"
ggagacaauuguuguccca

SEQ ID NO: 4856 - RNA, 19 nt, Artificial Sequence
  source: /note="Description of Artificial Sequence: Synthetic oligonucleotide"
  source: /note="Antisense strand to SEQ ID NO: 4855"
ugggacaacaauugucucc

SEQ ID NO: 4857 - RNA, 19 nt, Artificial Sequence
  source: /note="Description of Artificial Sequence: Synthetic oligonucleotide"
  source: /note="Sense strand starting at position 2050 of SEQ ID NO: 2899"
gucccaaucuuacaguuga

SEQ ID NO: 4858 - RNA, 19 nt, Artificial Sequence
  source: /note="Description of Artificial Sequence: Synthetic oligonucleotide"
  source: /note="Antisense strand to SEQ ID NO: 4857"
ucaacuguaagauugggac

SEQ ID NO: 4859 - RNA, 19 nt, Artificial Sequence
  source: /note="Description of Artificial Sequence: Synthetic oligonucleotide"
  source: /note="Sense strand starting at position 2050 of SEQ ID NO: 2906"
ucuuacaguugagggaaau

SEQ ID NO: 4860 - RNA, 19 nt, Artificial Sequence
  source: /note="Description of Artificial Sequence: Synthetic oligonucleotide"
  source: /note="Antisense strand to SEQ ID NO: 4859"
auuucccucaacuguaaga

SEQ ID NO: 4861 - RNA, 19 nt, Artificial Sequence
  source: /note="Description of Artificial Sequence: Synthetic oligonucleotide"
  source: /note="Sense strand starting at position 2050 of SEQ ID NO: 2959"
ugaauaccaugggaagguu

SEQ ID NO: 4862 - RNA, 19 nt, Artificial Sequence
  source: /note="Description of Artificial Sequence: Synthetic oligonucleotide"
  source: /note="Antisense strand to SEQ ID NO: 4861"
aaccuucccaugguauuca

SEQ ID NO: 4863 - RNA, 19 nt, Artificial Sequence
  source: /note="Description of Artificial Sequence: Synthetic oligonucleotide"
  source: /note="Sense strand starting at position 2050 of SEQ ID NO: 3050"
ggccguuugacauggugaa

SEQ ID NO: 4864 - RNA, 19 nt, Artificial Sequence
  source: /note="Description of Artificial Sequence: Synthetic oligonucleotide"
  source: /note="Antisense strand to SEQ ID NO: 4863"
uucaccaugucaaacggcc

SEQ ID NO: 4865 - RNA, 19 nt, Artificial Sequence
  source: /note="Description of Artificial Sequence: Synthetic oligonucleotide"
  source: /note="Sense strand starting at position 2050 of SEQ ID NO: 3051"
gccguuugacauggugaac

SEQ ID NO: 4866 - RNA, 19 nt, Artificial Sequence
  source: /note="Description of Artificial Sequence: Synthetic oligonucleotide"
  source: /note="Antisense strand to SEQ ID NO: 4865"
guucaccaugucaaacggc

SEQ ID NO: 4867 - RNA, 19 nt, Artificial Sequence
  source: /note="Description of Artificial Sequence: Synthetic oligonucleotide"
  source: /note="Sense strand starting at position 2050 of SEQ ID NO: 3159"
ggcagcaacuugcucuaau

SEQ ID NO: 4868 - RNA, 19 nt, Artificial Sequence
  source: /note="Description of Artificial Sequence: Synthetic oligonucleotide"
  source: /note="Antisense strand to SEQ ID NO: 4867"
auuagagcaaguugcugcc

SEQ ID NO: 4869 - RNA, 19 nt, Artificial Sequence
  source: /note="Description of Artificial Sequence: Synthetic oligonucleotide"
  source: /note="Sense strand starting at position 2050 of SEQ ID NO: 3160"
gcagcaacuugcucuaaug

SEQ ID NO: 4870 - RNA, 19 nt, Artificial Sequence
  source: /note="Description of Artificial Sequence: Synthetic oligonucleotide"
  source: /note="Antisense strand to SEQ ID NO: 4869"
cauuagagcaaguugcugc

SEQ ID NO: 4871 - RNA, 19 nt, Artificial Sequence
  source: /note="Description of Artificial Sequence: Synthetic oligonucleotide"
  source: /note="Sense strand starting at position 2050 of SEQ ID NO: 3170"
gcucuaaugugcuuaggag

SEQ ID NO: 4872 - RNA, 19 nt, Artificial Sequence
  source: /note="Description of Artificial Sequence: Synthetic oligonucleotide"
  source: /note="Antisense strand to SEQ ID NO: 4871"
cuccuaagcacauuagagc

SEQ ID NO: 4873 - RNA, 19 nt, Artificial Sequence
  source: /note="Description of Artificial Sequence: Synthetic oligonucleotide"
  source: /note="Sense strand starting at position 2050 of SEQ ID NO: 3290"
caaagaggcuaauacguua

SEQ ID NO: 4874 - RNA, 19 nt, Artificial Sequence
  source: /note="Description of Artificial Sequence: Synthetic oligonucleotide"
  source: /note="Antisense strand to SEQ ID NO: 4873"
uaacguauuagccucuuug

SEQ ID NO: 4875 - RNA, 19 nt, Artificial Sequence
  source: /note="Description of Artificial Sequence: Synthetic oligonucleotide"
  source: /note="Sense strand starting at position 2050 of SEQ ID NO: 3293"
agaggcuaauacguuauau

SEQ ID NO: 4876 - RNA, 19 nt, Artificial Sequence
  source: /note="Description of Artificial Sequence: Synthetic oligonucleotide"
  source: /note="Antisense strand to SEQ ID NO: 4875"
auauaacguauuagccucu

SEQ ID NO: 4877 - RNA, 19 nt, Artificial Sequence
  source: /note="Description of Artificial Sequence: Synthetic oligonucleotide"
  source: /note="Sense strand starting at position 2050 of SEQ ID NO: 3297"
gcuaauacguuauauucga

SEQ ID NO: 4878 - RNA, 19 nt, Artificial Sequence
  source: /note="Description of Artificial Sequence: Synthetic oligonucleotide"
  source: /note="Antisense strand to SEQ ID NO: 4877"
ucgaauauaacguauuagc

SEQ ID NO: 4879 - RNA, 19 nt, Artificial Sequence
  source: /note="Description of Artificial Sequence: Synthetic oligonucleotide"
  source: /note="Sense strand starting at position 2050 of SEQ ID NO: 3302"
uacguuauauucgaaugcu

SEQ ID NO: 4880 - RNA, 19 nt, Artificial Sequence
  source: /note="Description of Artificial Sequence: Synthetic oligonucleotide"
  source: /note="Antisense strand to SEQ ID NO: 4879"
agcauucgaauauaacgua

SEQ ID NO: 4881 - RNA, 19 nt, Artificial Sequence
  source: /note="Description of Artificial Sequence: Synthetic oligonucleotide"
  source: /note="Sense strand starting at position 2050 of SEQ ID NO: 3305"
guuauauucgaaugcugcu

SEQ ID NO: 4882 - RNA, 19 nt, Artificial Sequence
  source: /note="Description of Artificial Sequence: Synthetic oligonucleotide"
  source: /note="Antisense strand to SEQ ID NO: 4881"
agcagcauucgaauauaac

SEQ ID NO: 4883 - RNA, 19 nt, Artificial Sequence
  source: /note="Description of Artificial Sequence: Synthetic oligonucleotide"
  source: /note="Sense strand starting at position 2050 of SEQ ID NO: 3308"
auauucgaaugcugcuuua

SEQ ID NO: 4884 - RNA, 19 nt, Artificial Sequence
  source: /note="Description of Artificial Sequence: Synthetic oligonucleotide"
  source: /note="Antisense strand to SEQ ID NO: 4883"
uaaagcagcauucgaauau

SEQ ID NO: 4885 - RNA, 19 nt, Artificial Sequence
  source: /note="Description of Artificial Sequence: Synthetic oligonucleotide"
  source: /note="Sense strand starting at position 2050 of SEQ ID NO: 3350"
uugcuugaucuuuacagca

SEQ ID NO: 4886 - RNA, 19 nt, Artificial Sequence
  source: /note="Description of Artificial Sequence: Synthetic oligonucleotide"
  source: /note="Antisense strand to SEQ ID NO: 4885"
ugcuguaaagaucaagcaa

SEQ ID NO: 4887 - RNA, 19 nt, Artificial Sequence
  source: /note="Description of Artificial Sequence: Synthetic oligonucleotide"
  source: /note="Sense strand starting at position 2050 of SEQ ID NO: 3352"
gcuugaucuuuacagcaaa

SEQ ID NO: 4888 - RNA, 19 nt, Artificial Sequence
  source: /note="Description of Artificial Sequence: Synthetic oligonucleotide"
  source: /note="Antisense strand to SEQ ID NO: 4887"
uuugcuguaaagaucaagc

SEQ ID NO: 4889 - RNA, 19 nt, Artificial Sequence
  source: /note="Description of Artificial Sequence: Synthetic oligonucleotide"
  source: /note="Sense strand starting at position 2050 of SEQ ID NO: 3408"
agaugaaucuuuggagcuu

SEQ ID NO: 4890 - RNA, 19 nt, Artificial Sequence
  source: /note="Description of Artificial Sequence: Synthetic oligonucleotide"
  source: /note="Antisense strand to SEQ ID NO: 4889"
aagcuccaaagauucaucu

SEQ ID NO: 4891 - RNA, 19 nt, Artificial Sequence
  source: /note="Description of Artificial Sequence: Synthetic oligonucleotide"
  source: /note="Sense strand starting at position 2050 of SEQ ID NO: 3409"
gaugaaucuuuggagcuua

SEQ ID NO: 4892 - RNA, 19 nt, Artificial Sequence
  source: /note="Description of Artificial Sequence: Synthetic oligonucleotide"
  source: /note="Antisense strand to SEQ ID NO: 4891"
uaagcuccaaagauucauc

SEQ ID NO: 4893 - RNA, 19 nt, Artificial Sequence
  source: /note="Description of Artificial Sequence: Synthetic oligonucleotide"
  source: /note="Sense strand starting at position 2050 of SEQ ID NO: 3445"
cccugauguugcccagaug

SEQ ID NO: 4894 - RNA, 19 nt, Artificial Sequence
  source: /note="Description of Artificial Sequence: Synthetic oligonucleotide"
  source: /note="Antisense strand to SEQ ID NO: 4893"
caucugggcaacaucaggg

SEQ ID NO: 4895 - RNA, 19 nt, Artificial Sequence
  source: /note="Description of Artificial Sequence: Synthetic oligonucleotide"
  source: /note="Sense strand starting at position 2050 of SEQ ID NO: 3467"
aguggcaugucuccuaaca

SEQ ID NO: 4896 - RNA, 19 nt, Artificial Sequence
  source: /note="Description of Artificial Sequence: Synthetic oligonucleotide"
  source: /note="Antisense strand to SEQ ID NO: 4895"
uguuaggagacaugccacu

SEQ ID NO: 4897 - RNA, 19 nt, Artificial Sequence
  source: /note="Description of Artificial Sequence: Synthetic oligonucleotide"
  source: /note="Sense strand starting at position 2050 of SEQ ID NO: 3556"
aggauaauaugugaaauag

SEQ ID NO: 4898 - RNA, 19 nt, Artificial Sequence
  source: /note="Description of Artificial Sequence: Synthetic oligonucleotide"
  source: /note="Antisense strand to SEQ ID NO: 4897"
cuauuucacauauuauccu

SEQ ID NO: 4899 - RNA, 19 nt, Artificial Sequence
  source: /note="Description of Artificial Sequence: Synthetic oligonucleotide"
  source: /note="Sense strand starting at position 2050 of SEQ ID NO: 3693"
uuuaacuagugguaagacu

SEQ ID NO: 4900 - RNA, 19 nt, Artificial Sequence
  source: /note="Description of Artificial Sequence: Synthetic oligonucleotide"
  source: /note="Antisense strand to SEQ ID NO: 4899"
agucuuaccacuaguuaaa

SEQ ID NO: 4901 - RNA, 19 nt, Artificial Sequence
  source: /note="Description of Artificial Sequence: Synthetic oligonucleotide"
  source: /note="Sense strand starting at position 2050 of SEQ ID NO: 3720"
uagugaauauccugaaagu

SEQ ID NO: 4902 - RNA, 19 nt, Artificial Sequence
  source: /note="Description of Artificial Sequence: Synthetic oligonucleotide"
  source: /note="Antisense strand to SEQ ID NO: 4901"
acuuucaggauauucacua

SEQ ID NO: 4903 - RNA, 19 nt, Artificial Sequence
  source: /note="Description of Artificial Sequence: Synthetic oligonucleotide"
  source: /note="Sense strand starting at position 2050 of SEQ ID NO: 3802"
gccgcuugauuaguguaga

SEQ ID NO: 4904 - RNA, 19 nt, Artificial Sequence
  source: /note="Description of Artificial Sequence: Synthetic oligonucleotide"
  source: /note="Antisense strand to SEQ ID NO: 4903"
ucuacacuaaucaagcggc

SEQ ID NO: 4905 - RNA, 19 nt, Artificial Sequence
  source: /note="Description of Artificial Sequence: Synthetic oligonucleotide"
  source: /note="Sense strand starting at position 2050 of SEQ ID NO: 3803"
ccgcuugauuaguguagau

SEQ ID NO: 4906 - RNA, 19 nt, Artificial Sequence
  source: /note="Description of Artificial Sequence: Synthetic oligonucleotide"
  source: /note="Antisense strand to SEQ ID NO: 4905"
aucuacacuaaucaagcgg

SEQ ID NO: 4907 - RNA, 19 nt, Artificial Sequence
  source: /note="Description of Artificial Sequence: Synthetic oligonucleotide"
  source: /note="Sense strand starting at position 2050 of SEQ ID NO: 3958"
uuacuugguugaggaauga

SEQ ID NO: 4908 - RNA, 19 nt, Artificial Sequence
  source: /note="Description of Artificial Sequence: Synthetic oligonucleotide"
  source: /note="Antisense strand to SEQ ID NO: 4907"
ucauuccucaaccaaguaa

SEQ ID NO: 4909 - RNA, 19 nt, Artificial Sequence
  source: /note="Description of Artificial Sequence: Synthetic oligonucleotide"
  source: /note="Sense strand starting at position 2052 of SEQ ID NO: 168"
cagaaauagucacacggga

SEQ ID NO: 4910 - RNA, 19 nt, Artificial Sequence
  source: /note="Description of Artificial Sequence: Synthetic oligonucleotide"
  source: /note="Antisense strand to SEQ ID NO: 4909"
ucccgugugacuauuucug

SEQ ID NO: 4911 - RNA, 19 nt, Artificial Sequence
  source: /note="Description of Artificial Sequence: Synthetic oligonucleotide"
  source: /note="Sense strand starting at position 2052 of SEQ ID NO: 198"
agcggcacuaucuguaaua

SEQ ID NO: 4912 - RNA, 19 nt, Artificial Sequence
  source: /note="Description of Artificial Sequence: Synthetic oligonucleotide"
  source: /note="Antisense strand to SEQ ID NO: 4911"
uauuacagauagugccgcu

SEQ ID NO: 4913 - RNA, 19 nt, Artificial Sequence
  source: /note="Description of Artificial Sequence: Synthetic oligonucleotide"
  source: /note="Sense strand starting at position 2052 of SEQ ID NO: 199"
gcggcacuaucuguaauac

SEQ ID NO: 4914 - RNA, 19 nt, Artificial Sequence
  source: /note="Description of Artificial Sequence: Synthetic oligonucleotide"
  source: /note="Antisense strand to SEQ ID NO: 4913"
guauuacagauagugccgc

SEQ ID NO: 4915 - RNA, 19 nt, Artificial Sequence
  source: /note="Description of Artificial Sequence: Synthetic oligonucleotide"
  source: /note="Sense strand starting at position 2052 of SEQ ID NO: 200"
cggcacuaucuguaauacu

SEQ ID NO: 4916 - RNA, 19 nt, Artificial Sequence
  source: /note="Description of Artificial Sequence: Synthetic oligonucleotide"
  source: /note="Antisense strand to SEQ ID NO: 4915"
aguauuacagauagugccg

SEQ ID NO: 4917 - RNA, 19 nt, Artificial Sequence
  source: /note="Description of Artificial Sequence: Synthetic oligonucleotide"
  source: /note="Sense strand starting at position 2052 of SEQ ID NO: 279"
guauacucaugcuguggaa

SEQ ID NO: 4918 - RNA, 19 nt, Artificial Sequence
  source: /note="Description of Artificial Sequence: Synthetic oligonucleotide"
  source: /note="Antisense strand to SEQ ID NO: 4917"
uuccacagcaugaguauac

SEQ ID NO: 4919 - RNA, 19 nt, Artificial Sequence
  source: /note="Description of Artificial Sequence: Synthetic oligonucleotide"
  source: /note="Sense strand starting at position 2052 of SEQ ID NO: 281"
auacucaugcuguggaaua

SEQ ID NO: 4920 - RNA, 19 nt, Artificial Sequence
  source: /note="Description of Artificial Sequence: Synthetic oligonucleotide"
  source: /note="Antisense strand to SEQ ID NO: 4919"
uauuccacagcaugaguau

SEQ ID NO: 4921 - RNA, 19 nt, Artificial Sequence
  source: /note="Description of Artificial Sequence: Synthetic oligonucleotide"
  source: /note="Sense strand starting at position 2052 of SEQ ID NO: 282"
uacucaugcuguggaauac

SEQ ID NO: 4922 - RNA, 19 nt, Artificial Sequence
  source: /note="Description of Artificial Sequence: Synthetic oligonucleotide"
  source: /note="Antisense strand to SEQ ID NO: 4921"
guauuccacagcaugagua

SEQ ID NO: 4923 - RNA, 19 nt, Artificial Sequence
  source: /note="Description of Artificial Sequence: Synthetic oligonucleotide"
  source: /note="Sense strand starting at position 2052 of SEQ ID NO: 374"
ucaucuuguuaguacaaca

SEQ ID NO: 4924 - RNA, 19 nt, Artificial Sequence
  source: /note="Description of Artificial Sequence: Synthetic oligonucleotide"
  source: /note="Antisense strand to SEQ ID NO: 4923"
uguuguacuaacaagauga

SEQ ID NO: 4925 - RNA, 19 nt, Artificial Sequence
  source: /note="Description of Artificial Sequence: Synthetic oligonucleotide"
  source: /note="Sense strand starting at position 2052 of SEQ ID NO: 423"
auguaaauauaugugggua

SEQ ID NO: 4926 - RNA, 19 nt, Artificial Sequence
  source: /note="Description of Artificial Sequence: Synthetic oligonucleotide"
  source: /note="Antisense strand to SEQ ID NO: 4925"
uacccacauauauuuacau

SEQ ID NO: 4927 - RNA, 19 nt, Artificial Sequence
  source: /note="Description of Artificial Sequence: Synthetic oligonucleotide"
  source: /note="Sense strand starting at position 2052 of SEQ ID NO: 580"
auuaaauacugggagguca

SEQ ID NO: 4928 - RNA, 19 nt, Artificial Sequence
  source: /note="Description of Artificial Sequence: Synthetic oligonucleotide"
  source: /note="Antisense strand to SEQ ID NO: 4927"
ugaccucccaguauuuaau

SEQ ID NO: 4929 - RNA, 19 nt, Artificial Sequence
  source: /note="Description of Artificial Sequence: Synthetic oligonucleotide"
  source: /note="Sense strand starting at position 2052 of SEQ ID NO: 647"
uuaacaauguaauggaacu

SEQ ID NO: 4930 - RNA, 19 nt, Artificial Sequence
  source: /note="Description of Artificial Sequence: Synthetic oligonucleotide"
  source: /note="Antisense strand to SEQ ID NO: 4929"
aguuccauuacauuguuaa

SEQ ID NO: 4931 - RNA, 19 nt, Artificial Sequence
  source: /note="Description of Artificial Sequence: Synthetic oligonucleotide"
  source: /note="Sense strand starting at position 2052 of SEQ ID NO: 704"
cugaccaguucuuaacagu

SEQ ID NO: 4932 - RNA, 19 nt, Artificial Sequence
  source: /note="Description of Artificial Sequence: Synthetic oligonucleotide"
  source: /note="Antisense strand to SEQ ID NO: 4931"
acuguuaagaacuggucag

SEQ ID NO: 4933 - RNA, 19 nt, Artificial Sequence
  source: /note="Description of Artificial Sequence: Synthetic oligonucleotide"
  source: /note="Sense strand starting at position 2052 of SEQ ID NO: 734"
cgcaguuacgccagaggua

SEQ ID NO: 4934 - RNA, 19 nt, Artificial Sequence
  source: /note="Description of Artificial Sequence: Synthetic oligonucleotide"
  source: /note="Antisense strand to SEQ ID NO: 4933"
uaccucuggcguaacugcg

SEQ ID NO: 4935 - RNA, 19 nt, Artificial Sequence
  source: /note="Description of Artificial Sequence: Synthetic oligonucleotide"
  source: /note="Sense strand starting at position 2052 of SEQ ID NO: 749"
gguagcacacuuuaagcua

SEQ ID NO: 4936 - RNA, 19 nt, Artificial Sequence
  source: /note="Description of Artificial Sequence: Synthetic oligonucleotide"
  source: /note="Antisense strand to SEQ ID NO: 4935"
uagcuuaaagugugcuacc

SEQ ID NO: 4937 - RNA, 19 nt, Artificial Sequence
  source: /note="Description of Artificial Sequence: Synthetic oligonucleotide"
  source: /note="Sense strand starting at position 2052 of SEQ ID NO: 1191"
ggagacaagucaggacuua

SEQ ID NO: 4938 - RNA, 19 nt, Artificial Sequence
  source: /note="Description of Artificial Sequence: Synthetic oligonucleotide"
  source: /note="Antisense strand to SEQ ID NO: 4937"
uaaguccugacuugucucc

SEQ ID NO: 4939 - RNA, 19 nt, Artificial Sequence
  source: /note="Description of Artificial Sequence: Synthetic oligonucleotide"
  source: /note="Sense strand starting at position 2052 of SEQ ID NO: 1228"
ucggaacgugucugaacuu

SEQ ID NO: 4940 - RNA, 19 nt, Artificial Sequence
  source: /note="Description of Artificial Sequence: Synthetic oligonucleotide"
  source: /note="Antisense strand to SEQ ID NO: 4939"
aaguucagacacguuccga

SEQ ID NO: 4941 - RNA, 19 nt, Artificial Sequence
  source: /note="Description of Artificial Sequence: Synthetic oligonucleotide"
  source: /note="Sense strand starting at position 2052 of SEQ ID NO: 1456"
gcgagagccguccgaaauc

SEQ ID NO: 4942 - RNA, 19 nt, Artificial Sequence
  source: /note="Description of Artificial Sequence: Synthetic oligonucleotide"
  source: /note="Antisense strand to SEQ ID NO: 4941"
gauuucggacggcucucgc

SEQ ID NO: 4943 - RNA, 19 nt, Artificial Sequence
  source: /note="Description of Artificial Sequence: Synthetic oligonucleotide"
  source: /note="Sense strand starting at position 2052 of SEQ ID NO: 2222"
aagguuuggcgcugugaca

SEQ ID NO: 4944 - RNA, 19 nt, Artificial Sequence
  source: /note="Description of Artificial Sequence: Synthetic oligonucleotide"
  source: /note="Antisense strand to SEQ ID NO: 4943"
ugucacagcgccaaaccuu

SEQ ID NO: 4945 - RNA, 19 nt, Artificial Sequence
  source: /note="Description of Artificial Sequence: Synthetic oligonucleotide"
  source: /note="Sense strand starting at position 2052 of SEQ ID NO: 2253"
uugcgcuauguuuguauuu

SEQ ID NO: 4946 - RNA, 19 nt, Artificial Sequence
  source: /note="Description of Artificial Sequence: Synthetic oligonucleotide"
  source: /note="Antisense strand to SEQ ID NO: 4945"
aaauacaaacauagcgcaa

SEQ ID NO: 4947 - RNA, 19 nt, Artificial Sequence
  source: /note="Description of Artificial Sequence: Synthetic oligonucleotide"
  source: /note="Sense strand starting at position 2052 of SEQ ID NO: 2255"
gcgcuauguuuguauuucu

SEQ ID NO: 4948 - RNA, 19 nt, Artificial Sequence
  source: /note="Description of Artificial Sequence: Synthetic oligonucleotide"
  source: /note="Antisense strand to SEQ ID NO: 4947"
agaaauacaaacauagcgc

SEQ ID NO: 4949 - RNA, 19 nt, Artificial Sequence
  source: /note="Description of Artificial Sequence: Synthetic oligonucleotide"
  source: /note="Sense strand starting at position 2052 of SEQ ID NO: 2264"
uuguauuucuuguguuuac

SEQ ID NO: 4950 - RNA, 19 nt, Artificial Sequence
  source: /note="Description of Artificial Sequence: Synthetic oligonucleotide"
  source: /note="Antisense strand to SEQ ID NO: 4949"
guaaacacaagaaauacaa

SEQ ID NO: 4951 - RNA, 19 nt, Artificial Sequence
  source: /note="Description of Artificial Sequence: Synthetic oligonucleotide"
  source: /note="Sense strand starting at position 2052 of SEQ ID NO: 2296"
gguggaaacugcgacaaau

SEQ ID NO: 4952 - RNA, 19 nt, Artificial Sequence
  source: /note="Description of Artificial Sequence: Synthetic oligonucleotide"
  source: /note="Antisense strand to SEQ ID NO: 4951"
auuugucgcaguuuccacc

SEQ ID NO: 4953 - RNA, 19 nt, Artificial Sequence
  source: /note="Description of Artificial Sequence: Synthetic oligonucleotide"
  source: /note="Sense strand starting at position 2052 of SEQ ID NO: 2323"
ccgugucgcuguuaccaaa

SEQ ID NO: 4954 - RNA, 19 nt, Artificial Sequence
  source: /note="Description of Artificial Sequence: Synthetic oligonucleotide"
  source: /note="Antisense strand to SEQ ID NO: 4953"
uuugguaacagcgacacgg

SEQ ID NO: 4955 - RNA, 19 nt, Artificial Sequence
  source: /note="Description of Artificial Sequence: Synthetic oligonucleotide"
  source: /note="Sense strand starting at position 2052 of SEQ ID NO: 2399"
guuguacccaaaugaguua

SEQ ID NO: 4956 - RNA, 19 nt, Artificial Sequence
  source: /note="Description of Artificial Sequence: Synthetic oligonucleotide"
  source: /note="Antisense strand to SEQ ID NO: 4955"
uaacucauuuggguacaac

SEQ ID NO: 4957 - RNA, 19 nt, Artificial Sequence
  source: /note="Description of Artificial Sequence: Synthetic oligonucleotide"
  source: /note="Sense strand starting at position 2052 of SEQ ID NO: 2464"
ggcuuauacaccggugcau

SEQ ID NO: 4958 - RNA, 19 nt, Artificial Sequence
  source: /note="Description of Artificial Sequence: Synthetic oligonucleotide"
  source: /note="Antisense strand to SEQ ID NO: 4957"
augcaccgguguauaagcc

SEQ ID NO: 4959 - RNA, 19 nt, Artificial Sequence
  source: /note="Description of Artificial Sequence: Synthetic oligonucleotide"
  source: /note="Sense strand starting at position 2052 of SEQ ID NO: 2485"
agcuguucugguuggagaa

SEQ ID NO: 4960 - RNA, 19 nt, Artificial Sequence
  source: /note="Description of Artificial Sequence: Synthetic oligonucleotide"
  source: /note="Antisense strand to SEQ ID NO: 4959"
uucuccaaccagaacagcu

SEQ ID NO: 4961 - RNA, 19 nt, Artificial Sequence
  source: /note="Description of Artificial Sequence: Synthetic oligonucleotide"
  source: /note="Sense strand starting at position 2052 of SEQ ID NO: 2486"
gcuguucugguuggagaac

SEQ ID NO: 4962 - RNA, 19 nt, Artificial Sequence
  source: /note="Description of Artificial Sequence: Synthetic oligonucleotide"
  source: /note="Antisense strand to SEQ ID NO: 4961"
guucuccaaccagaacagc

SEQ ID NO: 4963 - RNA, 19 nt, Artificial Sequence
  source: /note="Description of Artificial Sequence: Synthetic oligonucleotide"
  source: /note="Sense strand starting at position 2052 of SEQ ID NO: 2488"
uguucugguuggagaacga

SEQ ID NO: 4964 - RNA, 19 nt, Artificial Sequence
  source: /note="Description of Artificial Sequence: Synthetic oligonucleotide"
  source: /note="Antisense strand to SEQ ID NO: 4963"
ucguucuccaaccagaaca

SEQ ID NO: 4965 - RNA, 19 nt, Artificial Sequence
  source: /note="Description of Artificial Sequence: Synthetic oligonucleotide"
  source: /note="Sense strand starting at position 2052 of SEQ ID NO: 2763"
gcaggacaauccugugaac

SEQ ID NO: 4966 - RNA, 19 nt, Artificial Sequence
  source: /note="Description of Artificial Sequence: Synthetic oligonucleotide"
  source: /note="Antisense strand to SEQ ID NO: 4965"
guucacaggauuguccugc

SEQ ID NO: 4967 - RNA, 19 nt, Artificial Sequence
  source: /note="Description of Artificial Sequence: Synthetic oligonucleotide"
  source: /note="Sense strand starting at position 2052 of SEQ ID NO: 2869"
aaaguuuggguuuguuaau

SEQ ID NO: 4968 - RNA, 19 nt, Artificial Sequence
  source: /note="Description of Artificial Sequence: Synthetic oligonucleotide"
  source: /note="Antisense strand to SEQ ID NO: 4967"
auuaacaaacccaaacuuu

SEQ ID NO: 4969 - RNA, 19 nt, Artificial Sequence
  source: /note="Description of Artificial Sequence: Synthetic oligonucleotide"
  source: /note="Sense strand starting at position 2052 of SEQ ID NO: 2875"
uggguuuguuaaucuacac

SEQ ID NO: 4970 - RNA, 19 nt, Artificial Sequence
  source: /note="Description of Artificial Sequence: Synthetic oligonucleotide"
  source: /note="Antisense strand to SEQ ID NO: 4969"
guguagauuaacaaaccca

SEQ ID NO: 4971 - RNA, 19 nt, Artificial Sequence
  source: /note="Description of Artificial Sequence: Synthetic oligonucleotide"
  source: /note="Sense strand starting at position 2052 of SEQ ID NO: 2990"
cucauaaauugaggacaua

SEQ ID NO: 4972 - RNA, 19 nt, Artificial Sequence
  source: /note="Description of Artificial Sequence: Synthetic oligonucleotide"
  source: /note="Antisense strand to SEQ ID NO: 4971"
uauguccucaauuuaugag

SEQ ID NO: 4973 - RNA, 19 nt, Artificial Sequence
  source: /note="Description of Artificial Sequence: Synthetic oligonucleotide"
  source: /note="Sense strand starting at position 2052 of SEQ ID NO: 3062"
uuucuucucuggccaguaa

SEQ ID NO: 4974 - RNA, 19 nt, Artificial Sequence
  source: /note="Description of Artificial Sequence: Synthetic oligonucleotide"
  source: /note="Antisense strand to SEQ ID NO: 4973"
uuacuggccagagaagaaa

SEQ ID NO: 4975 - RNA, 19 nt, Artificial Sequence
  source: /note="Description of Artificial Sequence: Synthetic oligonucleotide"
  source: /note="Sense strand starting at position 2052 of SEQ ID NO: 3219"
aguggucacucaguugauu

SEQ ID NO: 4976 - RNA, 19 nt, Artificial Sequence
  source: /note="Description of Artificial Sequence: Synthetic oligonucleotide"
  source: /note="Antisense strand to SEQ ID NO: 4975"
aaucaacugagugaccacu

SEQ ID NO: 4977 - RNA, 19 nt, Artificial Sequence
  source: /note="Description of Artificial Sequence: Synthetic oligonucleotide"
  source: /note="Sense strand starting at position 2052 of SEQ ID NO: 3237"
uuaaguugauugccaauau

SEQ ID NO: 4978 - RNA, 19 nt, Artificial Sequence
  source: /note="Description of Artificial Sequence: Synthetic oligonucleotide"
  source: /note="Antisense strand to SEQ ID NO: 4977"
auauuggcaaucaacuuaa

SEQ ID NO: 4979 - RNA, 19 nt, Artificial Sequence
  source: /note="Description of Artificial Sequence: Synthetic oligonucleotide"
  source: /note="Sense strand starting at position 2052 of SEQ ID NO: 3343"
agugcuugacccuggauga

SEQ ID NO: 4980 - RNA, 19 nt, Artificial Sequence
  source: /note="Description of Artificial Sequence: Synthetic oligonucleotide"
  source: /note="Antisense strand to SEQ ID NO: 4979"
ucauccagggucaagcacu

SEQ ID NO: 4981 - RNA, 19 nt, Artificial Sequence
  source: /note="Description of Artificial Sequence: Synthetic oligonucleotide"
  source: /note="Sense strand starting at position 2052 of SEQ ID NO: 3344"
gugcuugacccuggaugaa

SEQ ID NO: 4982 - RNA, 19 nt, Artificial Sequence
  source: /note="Description of Artificial Sequence: Synthetic oligonucleotide"
  source: /note="Antisense strand to SEQ ID NO: 4981"
uucauccagggucaagcac

SEQ ID NO: 4983 - RNA, 19 nt, Artificial Sequence
  source: /note="Description of Artificial Sequence: Synthetic oligonucleotide"
  source: /note="Sense strand starting at position 2052 of SEQ ID NO: 3711"
agagauaagugauagaggu

SEQ ID NO: 4984 - RNA, 19 nt, Artificial Sequence
  source: /note="Description of Artificial Sequence: Synthetic oligonucleotide"
  source: /note="Antisense strand to SEQ ID NO: 4983"
accucuaucacuuaucucu

SEQ ID NO: 4985 - RNA, 19 nt, Artificial Sequence
  source: /note="Description of Artificial Sequence: Synthetic oligonucleotide"
  source: /note="Sense strand starting at position 2052 of SEQ ID NO: 3721"
gauagagguugauauuugu

SEQ ID NO: 4986 - RNA, 19 nt, Artificial Sequence
  source: /note="Description of Artificial Sequence: Synthetic oligonucleotide"
  source: /note="Antisense strand to SEQ ID NO: 4985"
acaaauaucaaccucuauc

SEQ ID NO: 4987 - RNA, 19 nt, Artificial Sequence
  source: /note="Description of Artificial Sequence: Synthetic oligonucleotide"
  source: /note="Sense strand starting at position 2052 of SEQ ID NO: 3753"
aacgaauggguuugugcua

SEQ ID NO: 4988 - RNA, 19 nt, Artificial Sequence
  source: /note="Description of Artificial Sequence: Synthetic oligonucleotide"
  source: /note="Antisense strand to SEQ ID NO: 4987"
uagcacaaacccauucguu

SEQ ID NO: 4989 - RNA, 19 nt, Artificial Sequence
  source: /note="Description of Artificial Sequence: Synthetic oligonucleotide"
  source: /note="Sense strand starting at position 2052 of SEQ ID NO: 3855"
cuugaaagauggugagacu

SEQ ID NO: 4990 - RNA, 19 nt, Artificial Sequence
  source: /note="Description of Artificial Sequence: Synthetic oligonucleotide"
  source: /note="Antisense strand to SEQ ID NO: 4989"
agucucaccaucuuucaag

SEQ ID NO: 4991 - RNA, 19 nt, Artificial Sequence
  source: /note="Description of Artificial Sequence: Synthetic oligonucleotide"
  source: /note="Sense strand starting at position 2052 of SEQ ID NO: 3858"
gaaagauggugagacuuaa

SEQ ID NO: 4992 - RNA, 19 nt, Artificial Sequence
  source: /note="Description of Artificial Sequence: Synthetic oligonucleotide"
  source: /note="Antisense strand to SEQ ID NO: 4991"
uuaagucucaccaucuuuc

SEQ ID NO: 4993 - RNA, 19 nt, Artificial Sequence
  source: /note="Description of Artificial Sequence: Synthetic oligonucleotide"
  source: /note="Sense strand starting at position 2052 of SEQ ID NO: 3939"
agaggacuguuugagauac

SEQ ID NO: 4994 - RNA, 19 nt, Artificial Sequence
  source: /note="Description of Artificial Sequence: Synthetic oligonucleotide"
  source: /note="Antisense strand to SEQ ID NO: 4993"
guaucucaaacaguccucu

SEQ ID NO: 4995 - RNA, 19 nt, Artificial Sequence
  source: /note="Description of Artificial Sequence: Synthetic oligonucleotide"
  source: /note="Sense strand starting at position 2052 of SEQ ID NO: 3941"
aggacuguuugagauacaa

SEQ ID NO: 4996 - RNA, 19 nt, Artificial Sequence
  source: /note="Description of Artificial Sequence: Synthetic oligonucleotide"
  source: /note="Antisense strand to SEQ ID NO: 4995"
uuguaucucaaacaguccu

SEQ ID NO: 4997 - RNA, 19 nt, Artificial Sequence
  source: /note="Description of Artificial Sequence: Synthetic oligonucleotide"
  source: /note="Sense strand starting at position 2052 of SEQ ID NO: 3962"
aauaaauccguuugacuug

SEQ ID NO: 4998 - RNA, 19 nt, Artificial Sequence
  source: /note="Description of Artificial Sequence: Synthetic oligonucleotide"
  source: /note="Antisense strand to SEQ ID NO: 4997"
caagucaaacggauuuauu

SEQ ID NO: 4999 - RNA, 19 nt, Artificial Sequence
  source: /note="Description of Artificial Sequence: Synthetic oligonucleotide"
  source: /note="Sense strand starting at position 2052 of SEQ ID NO: 3967"
auccguuugacuugcauga

SEQ ID NO: 5000 - RNA, 19 nt, Artificial Sequence
  source: /note="Description of Artificial Sequence: Synthetic oligonucleotide"
  source: /note="Antisense strand to SEQ ID NO: 4999"
ucaugcaagucaaacggau

SEQ ID NO: 5001 - RNA, 19 nt, Artificial Sequence
  source: /note="Description of Artificial Sequence: Synthetic oligonucleotide"
  source: /note="Sense strand starting at position 2052 of SEQ ID NO: 3969"
ccguuugacuugcaugaaa

SEQ ID NO: 5002 - RNA, 19 nt, Artificial Sequence
  source: /note="Description of Artificial Sequence: Synthetic oligonucleotide"
  source: /note="Antisense strand to SEQ ID NO: 5001"
uuucaugcaagucaaacgg

SEQ ID NO: 5003 - RNA, 19 nt, Artificial Sequence
  source: /note="Description of Artificial Sequence: Synthetic oligonucleotide"
  source: /note="Sense strand starting at position 2052 of SEQ ID NO: 3971"
guuugacuugcaugaaagu

SEQ ID NO: 5004 - RNA, 19 nt, Artificial Sequence
  source: /note="Description of Artificial Sequence: Synthetic oligonucleotide"
  source: /note="Antisense strand to SEQ ID NO: 5003"
acuuucaugcaagucaaac

SEQ ID NO: 5005 - RNA, 19 nt, Artificial Sequence
  source: /note="Description of Artificial Sequence: Synthetic oligonucleotide"
  source: /note="Sense strand starting at position 2051 of SEQ ID NO: 579"
ucaguauuggcaggaguga

SEQ ID NO: 5006 - RNA, 19 nt, Artificial Sequence
  source: /note="Description of Artificial Sequence: Synthetic oligonucleotide"
  source: /note="Antisense strand to SEQ ID NO: 5005"
ucacuccugccaauacuga

SEQ ID NO: 5007 - RNA, 19 nt, Artificial Sequence
  source: /note="Description of Artificial Sequence: Synthetic oligonucleotide"
  source: /note="Sense strand starting at position 2051 of SEQ ID NO: 620"
gcaaguuaccaguagcaau

SEQ ID NO: 5008 - RNA, 19 nt, Artificial Sequence
  source: /note="Description of Artificial Sequence: Synthetic oligonucleotide"
  source: /note="Antisense strand to SEQ ID NO: 5007"
auugcuacugguaacuugc

SEQ ID NO: 5009 - RNA, 19 nt, Artificial Sequence
  source: /note="Description of Artificial Sequence: Synthetic oligonucleotide"
  source: /note="Sense strand starting at position 2051 of SEQ ID NO: 1013"
cagaaauagucacacggga

SEQ ID NO: 5010 - RNA, 19 nt, Artificial Sequence
  source: /note="Description of Artificial Sequence: Synthetic oligonucleotide"
  source: /note="Antisense strand to SEQ ID NO: 5009"
ucccgugugacuauuucug

SEQ ID NO: 5011 - RNA, 19 nt, Artificial Sequence
  source: /note="Description of Artificial Sequence: Synthetic oligonucleotide"
  source: /note="Sense strand starting at position 2051 of SEQ ID NO: 1043"
agcggcacuaucuguaaua

SEQ ID NO: 5012 - RNA, 19 nt, Artificial Sequence
  source: /note="Description of Artificial Sequence: Synthetic oligonucleotide"
  source: /note="Antisense strand to SEQ ID NO: 5011"
uauuacagauagugccgcu

SEQ ID NO: 5013 - RNA, 19 nt, Artificial Sequence
  source: /note="Description of Artificial Sequence: Synthetic oligonucleotide"
  source: /note="Sense strand starting at position 2051 of SEQ ID NO: 1044"
gcggcacuaucuguaauac

SEQ ID NO: 5014 - RNA, 19 nt, Artificial Sequence
  source: /note="Description of Artificial Sequence: Synthetic oligonucleotide"
  source: /note="Antisense strand to SEQ ID NO: 5013"
guauuacagauagugccgc

SEQ ID NO: 5015 - RNA, 19 nt, Artificial Sequence
  source: /note="Description of Artificial Sequence: Synthetic oligonucleotide"
  source: /note="Sense strand starting at position 2051 of SEQ ID NO: 1045"
cggcacuaucuguaauacu

SEQ ID NO: 5016 - RNA, 19 nt, Artificial Sequence
  source: /note="Description of Artificial Sequence: Synthetic oligonucleotide"
  source: /note="Antisense strand to SEQ ID NO: 5015"
aguauuacagauagugccg

SEQ ID NO: 5017 - RNA, 19 nt, Artificial Sequence
  source: /note="Description of Artificial Sequence: Synthetic oligonucleotide"
  source: /note="Sense strand starting at position 2051 of SEQ ID NO: 1124"
guauacucaugcuguggaa

SEQ ID NO: 5018 - RNA, 19 nt, Artificial Sequence
  source: /note="Description of Artificial Sequence: Synthetic oligonucleotide"
  source: /note="Antisense strand to SEQ ID NO: 5017"
uuccacagcaugaguauac

SEQ ID NO: 5019 - RNA, 19 nt, Artificial Sequence
  source: /note="Description of Artificial Sequence: Synthetic oligonucleotide"
  source: /note="Sense strand starting at position 2051 of SEQ ID NO: 1126"
auacucaugcuguggaaua

SEQ ID NO: 5020 - RNA, 19 nt, Artificial Sequence
  source: /note="Description of Artificial Sequence: Synthetic oligonucleotide"
  source: /note="Antisense strand to SEQ ID NO: 5019"
uauuccacagcaugaguau

SEQ ID NO: 5021 - RNA, 19 nt, Artificial Sequence
  source: /note="Description of Artificial Sequence: Synthetic oligonucleotide"
  source: /note="Sense strand starting at position 2051 of SEQ ID NO: 1127"
uacucaugcuguggaauac

SEQ ID NO: 5022 - RNA, 19 nt, Artificial Sequence
  source: /note="Description of Artificial Sequence: Synthetic oligonucleotide"
  source: /note="Antisense strand to SEQ ID NO: 5021"
guauuccacagcaugagua

SEQ ID NO: 5023 - RNA, 19 nt, Artificial Sequence
  source: /note="Description of Artificial Sequence: Synthetic oligonucleotide"
  source: /note="Sense strand starting at position 2051 of SEQ ID NO: 1219"
ucaucuuguuaguacaaca

SEQ ID NO: 5024 - RNA, 19 nt, Artificial Sequence
  source: /note="Description of Artificial Sequence: Synthetic oligonucleotide"
  source: /note="Antisense strand to SEQ ID NO: 5023"
uguuguacuaacaagauga

SEQ ID NO: 5025 - RNA, 19 nt, Artificial Sequence
  source: /note="Description of Artificial Sequence: Synthetic oligonucleotide"
  source: /note="Sense strand starting at position 2051 of SEQ ID NO: 1268"
auguaaauauaugugggua

SEQ ID NO: 5026 - RNA, 19 nt, Artificial Sequence
  source: /note="Description of Artificial Sequence: Synthetic oligonucleotide"
  source: /note="Antisense strand to SEQ ID NO: 5025"
uacccacauauauuuacau

SEQ ID NO: 5027 - RNA, 19 nt, Artificial Sequence
  source: /note="Description of Artificial Sequence: Synthetic oligonucleotide"
  source: /note="Sense strand starting at position 2051 of SEQ ID NO: 1425"
auuaaauacugggagguca

SEQ ID NO: 5028 - RNA, 19 nt, Artificial Sequence
  source: /note="Description of Artificial Sequence: Synthetic oligonucleotide"
  source: /note="Antisense strand to SEQ ID NO: 5027"
ugaccucccaguauuuaau

SEQ ID NO: 5029 - RNA, 19 nt, Artificial Sequence
  source: /note="Description of Artificial Sequence: Synthetic oligonucleotide"
  source: /note="Sense strand starting at position 2051 of SEQ ID NO: 1492"
uuaacaauguaauggaacu

SEQ ID NO: 5030 - RNA, 19 nt, Artificial Sequence
  source: /note="Description of Artificial Sequence: Synthetic oligonucleotide"
  source: /note="Antisense strand to SEQ ID NO: 5029"
aguuccauuacauuguuaa

SEQ ID NO: 5031 - RNA, 19 nt, Artificial Sequence
  source: /note="Description of Artificial Sequence: Synthetic oligonucleotide"
  source: /note="Sense strand starting at position 2051 of SEQ ID NO: 1549"
cugaccaguucuuaacagu

SEQ ID NO: 5032 - RNA, 19 nt, Artificial Sequence
  source: /note="Description of Artificial Sequence: Synthetic oligonucleotide"
  source: /note="Antisense strand to SEQ ID NO: 5031"
acuguuaagaacuggucag

SEQ ID NO: 5033 - RNA, 19 nt, Artificial Sequence
  source: /note="Description of Artificial Sequence: Synthetic oligonucleotide"
  source: /note="Sense strand starting at position 2051 of SEQ ID NO: 1579"
cgcaguuacgccagaggua

SEQ ID NO: 5034 - RNA, 19 nt, Artificial Sequence
  source: /note="Description of Artificial Sequence: Synthetic oligonucleotide"
  source: /note="Antisense strand to SEQ ID NO: 5033"
uaccucuggcguaacugcg

SEQ ID NO: 5035 - RNA, 19 nt, Artificial Sequence
  source: /note="Description of Artificial Sequence: Synthetic oligonucleotide"
  source: /note="Sense strand starting at position 2051 of SEQ ID NO: 1594"
gguagcacacuuuaagcua

SEQ ID NO: 5036 - RNA, 19 nt, Artificial Sequence
  source: /note="Description of Artificial Sequence: Synthetic oligonucleotide"
  source: /note="Antisense strand to SEQ ID NO: 5035"
uagcuuaaagugugcuacc

SEQ ID NO: 5037 - RNA, 19 nt, Artificial Sequence
  source: /note="Description of Artificial Sequence: Synthetic oligonucleotide"
  source: /note="Sense strand starting at position 2051 of SEQ ID NO: 2036"
ggagacaagucaggacuua

SEQ ID NO: 5038 - RNA, 19 nt, Artificial Sequence
  source: /note="Description of Artificial Sequence: Synthetic oligonucleotide"
  source: /note="Antisense strand to SEQ ID NO: 5037"
uaaguccugacuugucucc

SEQ ID NO: 5039 - RNA, 19 nt, Artificial Sequence
  source: /note="Description of Artificial Sequence: Synthetic oligonucleotide"
  source: /note="Sense strand starting at position 2051 of SEQ ID NO: 2073"
ucggaacgugucugaacuu

SEQ ID NO: 5040 - RNA, 19 nt, Artificial Sequence
  source: /note="Description of Artificial Sequence: Synthetic oligonucleotide"
  source: /note="Antisense strand to SEQ ID NO: 5039"
aaguucagacacguuccga

SEQ ID NO: 5041 - RNA, 19 nt, Artificial Sequence
  source: /note="Description of Artificial Sequence: Synthetic oligonucleotide"
  source: /note="Sense strand starting at position 2051 of SEQ ID NO: 2301"
gcgagagccguccgaaauc

SEQ ID NO: 5042 - RNA, 19 nt, Artificial Sequence
  source: /note="Description of Artificial Sequence: Synthetic oligonucleotide"
  source: /note="Antisense strand to SEQ ID NO: 5041"
gauuucggacggcucucgc

SEQ ID NO: 5043 - RNA, 19 nt, Artificial Sequence
  source: /note="Description of Artificial Sequence: Synthetic oligonucleotide"
  source: /note="Sense strand starting at position 2051 of SEQ ID NO: 3067"
aagguuuggcgcugugaca

SEQ ID NO: 5044 - RNA, 19 nt, Artificial Sequence
  source: /note="Description of Artificial Sequence: Synthetic oligonucleotide"
  source: /note="Antisense strand to SEQ ID NO: 5043"
ugucacagcgccaaaccuu

SEQ ID NO: 5045 - RNA, 19 nt, Artificial Sequence
  source: /note="Description of Artificial Sequence: Synthetic oligonucleotide"
  source: /note="Sense strand starting at position 2051 of SEQ ID NO: 3098"
uugcgcuauguuuguauuu

SEQ ID NO: 5046 - RNA, 19 nt, Artificial Sequence
  source: /note="Description of Artificial Sequence: Synthetic oligonucleotide"
  source: /note="Antisense strand to SEQ ID NO: 5045"
aaauacaaacauagcgcaa

SEQ ID NO: 5047 - RNA, 19 nt, Artificial Sequence
  source: /note="Description of Artificial Sequence: Synthetic oligonucleotide"
  source: /note="Sense strand starting at position 2051 of SEQ ID NO: 3100"
gcgcuauguuuguauuucu

SEQ ID NO: 5048 - RNA, 19 nt, Artificial Sequence
  source: /note="Description of Artificial Sequence: Synthetic oligonucleotide"
  source: /note="Antisense strand to SEQ ID NO: 5047"
agaaauacaaacauagcgc

SEQ ID NO: 5049 - RNA, 19 nt, Artificial Sequence
  source: /note="Description of Artificial Sequence: Synthetic oligonucleotide"
  source: /note="Sense strand starting at position 2051 of SEQ ID NO: 3109"
uuguauuucuuguguuuac

SEQ ID NO: 5050 - RNA, 19 nt, Artificial Sequence
  source: /note="Description of Artificial Sequence: Synthetic oligonucleotide"
  source: /note="Antisense strand to SEQ ID NO: 5049"
guaaacacaagaaauacaa

SEQ ID NO: 5051 - RNA, 19 nt, Artificial Sequence
  source: /note="Description of Artificial Sequence: Synthetic oligonucleotide"
  source: /note="Sense strand starting at position 2051 of SEQ ID NO: 3141"
gguggaaacugcgacaaau

SEQ ID NO: 5052 - RNA, 19 nt, Artificial Sequence
  source: /note="Description of Artificial Sequence: Synthetic oligonucleotide"
  source: /note="Antisense strand to SEQ ID NO: 5051"
auuugucgcaguuuccacc

SEQ ID NO: 5053 - RNA, 19 nt, Artificial Sequence
  source: /note="Description of Artificial Sequence: Synthetic oligonucleotide"
  source: /note="Sense strand starting at position 2051 of SEQ ID NO: 3168"
ccgugucgcuguuaccaaa

SEQ ID NO: 5054 - RNA, 19 nt, Artificial Sequence
  source: /note="Description of Artificial Sequence: Synthetic oligonucleotide"
  source: /note="Antisense strand to SEQ ID NO: 5053"
uuugguaacagcgacacgg

SEQ ID NO: 5055 - RNA, 19 nt, Artificial Sequence
  source: /note="Description of Artificial Sequence: Synthetic oligonucleotide"
  source: /note="Sense strand starting at position 2051 of SEQ ID NO: 3244"
guuguacccaaaugaguua

SEQ ID NO: 5056 - RNA, 19 nt, Artificial Sequence
  source: /note="Description of Artificial Sequence: Synthetic oligonucleotide"
  source: /note="Antisense strand to SEQ ID NO: 5055"
uaacucauuuggguacaac

SEQ ID NO: 5057 - RNA, 19 nt, Artificial Sequence
  source: /note="Description of Artificial Sequence: Synthetic oligonucleotide"
  source: /note="Sense strand starting at position 2051 of SEQ ID NO: 3309"
ggcuuauacaccggugcau

SEQ ID NO: 5058 - RNA, 19 nt, Artificial Sequence
  source: /note="Description of Artificial Sequence: Synthetic oligonucleotide"
  source: /note="Antisense strand to SEQ ID NO: 5057"
augcaccgguguauaagcc

SEQ ID NO: 5059 - RNA, 19 nt, Artificial Sequence
  source: /note="Description of Artificial Sequence: Synthetic oligonucleotide"
  source: /note="Sense strand starting at position 2051 of SEQ ID NO: 3330"
agcuguucugguuggagaa

SEQ ID NO: 5060 - RNA, 19 nt, Artificial Sequence
  source: /note="Description of Artificial Sequence: Synthetic oligonucleotide"
  source: /note="Antisense strand to SEQ ID NO: 5059"
uucuccaaccagaacagcu

SEQ ID NO: 5061 - RNA, 19 nt, Artificial Sequence
  source: /note="Description of Artificial Sequence: Synthetic oligonucleotide"
  source: /note="Sense strand starting at position 2051 of SEQ ID NO: 3331"
gcuguucugguuggagaac

SEQ ID NO: 5062 - RNA, 19 nt, Artificial Sequence
  source: /note="Description of Artificial Sequence: Synthetic oligonucleotide"
  source: /note="Antisense strand to SEQ ID NO: 5061"
guucuccaaccagaacagc

SEQ ID NO: 5063 - RNA, 19 nt, Artificial Sequence
  source: /note="Description of Artificial Sequence: Synthetic oligonucleotide"
  source: /note="Sense strand starting at position 2051 of SEQ ID NO: 3333"
uguucugguuggagaacga

SEQ ID NO: 5064 - RNA, 19 nt, Artificial Sequence
  source: /note="Description of Artificial Sequence: Synthetic oligonucleotide"
  source: /note="Antisense strand to SEQ ID NO: 5063"
ucguucuccaaccagaaca

SEQ ID NO: 5065 - RNA, 19 nt, Artificial Sequence
  source: /note="Description of Artificial Sequence: Synthetic oligonucleotide"
  source: /note="Sense strand starting at position 2051 of SEQ ID NO: 3608"
gcaggacaauccugugaac

SEQ ID NO: 5066 - RNA, 19 nt, Artificial Sequence
  source: /note="Description of Artificial Sequence: Synthetic oligonucleotide"
  source: /note="Antisense strand to SEQ ID NO: 5065"
guucacaggauuguccugc

SEQ ID NO: 5067 - RNA, 19 nt, Artificial Sequence
  source: /note="Description of Artificial Sequence: Synthetic oligonucleotide"
  source: /note="Sense strand starting at position 2051 of SEQ ID NO: 3714"
aaaguuuggguuuguuaau

SEQ ID NO: 5068 - RNA, 19 nt, Artificial Sequence
  source: /note="Description of Artificial Sequence: Synthetic oligonucleotide"
  source: /note="Antisense strand to SEQ ID NO: 5067"
auuaacaaacccaaacuuu

SEQ ID NO: 5069 - RNA, 19 nt, Artificial Sequence
  source: /note="Description of Artificial Sequence: Synthetic oligonucleotide"
  source: /note="Sense strand starting at position 2051 of SEQ ID NO: 3720"
uggguuuguuaaucuacac

SEQ ID NO: 5070 - RNA, 19 nt, Artificial Sequence
  source: /note="Description of Artificial Sequence: Synthetic oligonucleotide"
  source: /note="Antisense strand to SEQ ID NO: 5069"
guguagauuaacaaaccca

SEQ ID NO: 5071 - RNA, 19 nt, Artificial Sequence
  source: /note="Description of Artificial Sequence: Synthetic oligonucleotide"
  source: /note="Sense strand starting at position 2051 of SEQ ID NO: 3835"
cucauaaauugaggacaua

SEQ ID NO: 5072 - RNA, 19 nt, Artificial Sequence
  source: /note="Description of Artificial Sequence: Synthetic oligonucleotide"
  source: /note="Antisense strand to SEQ ID NO: 5071"
uauguccucaauuuaugag

SEQ ID NO: 5073 - RNA, 19 nt, Artificial Sequence
  source: /note="Description of Artificial Sequence: Synthetic oligonucleotide"
  source: /note="Sense strand starting at position 2051 of SEQ ID NO: 3907"
uuucuucucuggccaguaa

SEQ ID NO: 5074 - RNA, 19 nt, Artificial Sequence
  source: /note="Description of Artificial Sequence: Synthetic oligonucleotide"
  source: /note="Antisense strand to SEQ ID NO: 5073"
uuacuggccagagaagaaa

SEQ ID NO: 5075 - RNA, 19 nt, Artificial Sequence
  source: /note="Description of Artificial Sequence: Synthetic oligonucleotide"
  source: /note="Sense strand starting at position 2053 of SEQ ID NO: 328"
cggcguuucuggcuucggu

SEQ ID NO: 5076 - RNA, 19 nt, Artificial Sequence
  source: /note="Description of Artificial Sequence: Synthetic oligonucleotide"
  source: /note="Antisense strand to SEQ ID NO: 5075"
accgaagccagaaacgccg

SEQ ID NO: 5077 - RNA, 19 nt, Artificial Sequence
  source: /note="Description of Artificial Sequence: Synthetic oligonucleotide"
  source: /note="Sense strand starting at position 2053 of SEQ ID NO: 771"
acagcuucgcucgacauca

SEQ ID NO: 5078 - RNA, 19 nt, Artificial Sequence
  source: /note="Description of Artificial Sequence: Synthetic oligonucleotide"
  source: /note="Antisense strand to SEQ ID NO: 5077"
ugaugucgagcgaagcugu

SEQ ID NO: 5079 - RNA, 19 nt, Artificial Sequence
  source: /note="Description of Artificial Sequence: Synthetic oligonucleotide"
  source: /note="Sense strand starting at position 2053 of SEQ ID NO: 779"
gcucgacaucaccgcguga

SEQ ID NO: 5080 - RNA, 19 nt, Artificial Sequence
  source: /note="Description of Artificial Sequence: Synthetic oligonucleotide"
  source: /note="Antisense strand to SEQ ID NO: 5079"
ucacgcggugaugucgagc

SEQ ID NO: 5081 - RNA, 19 nt, Artificial Sequence
  source: /note="Description of Artificial Sequence: Synthetic oligonucleotide"
  source: /note="Sense strand starting at position 2053 of SEQ ID NO: 781"
ucgacaucaccgcgugacu

SEQ ID NO: 5082 - RNA, 19 nt, Artificial Sequence
  source: /note="Description of Artificial Sequence: Synthetic oligonucleotide"
  source: /note="Antisense strand to SEQ ID NO: 5081"
agucacgcggugaugucga

SEQ ID NO: 5083 - RNA, 19 nt, Artificial Sequence
  source: /note="Description of Artificial Sequence: Synthetic oligonucleotide"
  source: /note="Sense strand starting at position 2053 of SEQ ID NO: 1051"
gcggccacgcuugagucaa

SEQ ID NO: 5084 - RNA, 19 nt, Artificial Sequence
  source: /note="Description of Artificial Sequence: Synthetic oligonucleotide"
  source: /note="Antisense strand to SEQ ID NO: 5083"
uugacucaagcguggccgc

SEQ ID NO: 5085 - RNA, 19 nt, Artificial Sequence
  source: /note="Description of Artificial Sequence: Synthetic oligonucleotide"
  source: /note="Sense strand starting at position 2053 of SEQ ID NO: 2946"
cgaguguguuccucggagu

SEQ ID NO: 5086 - RNA, 19 nt, Artificial Sequence
  source: /note="Description of Artificial Sequence: Synthetic oligonucleotide"
  source: /note="Antisense strand to SEQ ID NO: 5085"
acuccgaggaacacacucg

SEQ ID NO: 5087 - RNA, 19 nt, Artificial Sequence
  source: /note="Description of Artificial Sequence: Synthetic oligonucleotide"
  source: /note="Sense strand starting at position 2053 of SEQ ID NO: 2947"
gaguguguuccucggaguc

SEQ ID NO: 5088 - RNA, 19 nt, Artificial Sequence
  source: /note="Description of Artificial Sequence: Synthetic oligonucleotide"
  source: /note="Antisense strand to SEQ ID NO: 5087"
gacuccgaggaacacacuc

SEQ ID NO: 5089 - RNA, 19 nt, Artificial Sequence
  source: /note="Description of Artificial Sequence: Synthetic oligonucleotide"
  source: /note="Sense strand starting at position 2053 of SEQ ID NO: 3292"
uugcgaacgaccugugcaa

SEQ ID NO: 5090 - RNA, 19 nt, Artificial Sequence
  source: /note="Description of Artificial Sequence: Synthetic oligonucleotide"
  source: /note="Antisense strand to SEQ ID NO: 5089"
uugcacaggucguucgcaa

SEQ ID NO: 5091 - RNA, 19 nt, Artificial Sequence
  source: /note="Description of Artificial Sequence: Synthetic oligonucleotide"
  source: /note="Sense strand starting at position 2053 of SEQ ID NO: 3311"
gucugaauaacuggguugu

SEQ ID NO: 5092 - RNA, 19 nt, Artificial Sequence
  source: /note="Description of Artificial Sequence: Synthetic oligonucleotide"
  source: /note="Antisense strand to SEQ ID NO: 5091"
acaacccaguuauucagac

SEQ ID NO: 5093 - RNA, 19 nt, Artificial Sequence
  source: /note="Description of Artificial Sequence: Synthetic oligonucleotide"
  source: /note="Sense strand starting at position 2053 of SEQ ID NO: 3313"
cugaauaacuggguuguga

SEQ ID NO: 5094 - RNA, 19 nt, Artificial Sequence
  source: /note="Description of Artificial Sequence: Synthetic oligonucleotide"
  source: /note="Antisense strand to SEQ ID NO: 5093"
ucacaacccaguuauucag

SEQ ID NO: 5095 - RNA, 19 nt, Artificial Sequence
  source: /note="Description of Artificial Sequence: Synthetic oligonucleotide"
  source: /note="Sense strand starting at position 2053 of SEQ ID NO: 3315"
gaauaacuggguugugacu

SEQ ID NO: 5096 - RNA, 19 nt, Artificial Sequence
  source: /note="Description of Artificial Sequence: Synthetic oligonucleotide"
  source: /note="Antisense strand to SEQ ID NO: 5095"
agucacaacccaguuauuc

SEQ ID NO: 5097 - RNA, 19 nt, Artificial Sequence
  source: /note="Description of Artificial Sequence: Synthetic oligonucleotide"
  source: /note="Sense strand starting at position 2053 of SEQ ID NO: 3321"
cuggguugugacuaccaga

SEQ ID NO: 5098 - RNA, 19 nt, Artificial Sequence
  source: /note="Description of Artificial Sequence: Synthetic oligonucleotide"
  source: /note="Antisense strand to SEQ ID NO: 5097"
ucugguagucacaacccag

SEQ ID NO: 5099 - RNA, 19 nt, Artificial Sequence
  source: /note="Description of Artificial Sequence: Synthetic oligonucleotide"
  source: /note="Sense strand starting at position 2053 of SEQ ID NO: 3324"
gguugugacuaccagagga

SEQ ID NO: 5100 - RNA, 19 nt, Artificial Sequence
  source: /note="Description of Artificial Sequence: Synthetic oligonucleotide"
  source: /note="Antisense strand to SEQ ID NO: 5099"
uccucugguagucacaacc

SEQ ID NO: 5101 - RNA, 19 nt, Artificial Sequence
  source: /note="Description of Artificial Sequence: Synthetic oligonucleotide"
  source: /note="Sense strand starting at position 2053 of SEQ ID NO: 3363"
aauugugagucugcaggga

SEQ ID NO: 5102 - RNA, 19 nt, Artificial Sequence
  source: /note="Description of Artificial Sequence: Synthetic oligonucleotide"
  source: /note="Antisense strand to SEQ ID NO: 5101"
ucccugcagacucacaauu

SEQ ID NO: 5103 - RNA, 19 nt, Artificial Sequence
  source: /note="Description of Artificial Sequence: Synthetic oligonucleotide"
  source: /note="Sense strand starting at position 2053 of SEQ ID NO: 3380"
gacggaagucaccggcaaa

SEQ ID NO: 5104 - RNA, 19 nt, Artificial Sequence
  source: /note="Description of Artificial Sequence: Synthetic oligonucleotide"
  source: /note="Antisense strand to SEQ ID NO: 5103"
uuugccggugacuuccguc

SEQ ID NO: 5105 - RNA, 19 nt, Artificial Sequence
  source: /note="Description of Artificial Sequence: Synthetic oligonucleotide"
  source: /note="Sense strand starting at position 2053 of SEQ ID NO: 3566"
gugacaucacccugaggcu

SEQ ID NO: 5106 - RNA, 19 nt, Artificial Sequence
  source: /note="Description of Artificial Sequence: Synthetic oligonucleotide"
  source: /note="Antisense strand to SEQ ID NO: 5105"
agccucagggugaugucac

SEQ ID NO: 5107 - RNA, 19 nt, Artificial Sequence
  source: /note="Description of Artificial Sequence: Synthetic oligonucleotide"
  source: /note="Sense strand starting at position 2053 of SEQ ID NO: 3780"
gcccaccaagcauaagaua

SEQ ID NO: 5108 - RNA, 19 nt, Artificial Sequence
  source: /note="Description of Artificial Sequence: Synthetic oligonucleotide"
  source: /note="Antisense strand to SEQ ID NO: 5107"
uaucuuaugcuuggugggc

SEQ ID NO: 5109 - RNA, 19 nt, Artificial Sequence
  source: /note="Description of Artificial Sequence: Synthetic oligonucleotide"
  source: /note="Sense strand starting at position 2053 of SEQ ID NO: 3887"
cugggaucucuugaguuau

SEQ ID NO: 5110 - RNA, 19 nt, Artificial Sequence
  source: /note="Description of Artificial Sequence: Synthetic oligonucleotide"
  source: /note="Antisense strand to SEQ ID NO: 5109"
auaacucaagagaucccag

SEQ ID NO: 5111 - RNA, 19 nt, Artificial Sequence
  source: /note="Description of Artificial Sequence: Synthetic oligonucleotide"
  source: /note="Sense strand starting at position 2053 of SEQ ID NO: 3889"
gggaucucuugaguuauag

SEQ ID NO: 5112 - RNA, 19 nt, Artificial Sequence
  source: /note="Description of Artificial Sequence: Synthetic oligonucleotide"
  source: /note="Antisense strand to SEQ ID NO: 5111"
cuauaacucaagagauccc

SEQ ID NO: 5113 - RNA, 19 nt, Artificial Sequence
  source: /note="Description of Artificial Sequence: Synthetic oligonucleotide"
  source: /note="Sense strand starting at position 2053 of SEQ ID NO: 3899"
gaguuauagaugcggacau

SEQ ID NO: 5114 - RNA, 19 nt, Artificial Sequence
  source: /note="Description of Artificial Sequence: Synthetic oligonucleotide"
  source: /note="Antisense strand to SEQ ID NO: 5113"
auguccgcaucuauaacuc

SEQ ID NO: 5115 - RNA, 19 nt, Artificial Sequence
  source: /note="Description of Artificial Sequence: Synthetic oligonucleotide"
  source: /note="Sense strand starting at position 2054 of SEQ ID NO: 42"
aggguuucuucccgacaga

SEQ ID NO: 5116 - RNA, 19 nt, Artificial Sequence
  source: /note="Description of Artificial Sequence: Synthetic oligonucleotide"
  source: /note="Antisense strand to SEQ ID NO: 5115"
ucugucgggaagaaacccu

SEQ ID NO: 5117 - RNA, 19 nt, Artificial Sequence
  source: /note="Description of Artificial Sequence: Synthetic oligonucleotide"
  source: /note="Sense strand starting at position 2054 of SEQ ID NO: 110"
cccuguuugucucauugga

SEQ ID NO: 5118 - RNA, 19 nt, Artificial Sequence
  source: /note="Description of Artificial Sequence: Synthetic oligonucleotide"
  source: /note="Antisense strand to SEQ ID NO: 5117"
uccaaugagacaaacaggg

SEQ ID NO: 5119 - RNA, 19 nt, Artificial Sequence
  source: /note="Description of Artificial Sequence: Synthetic oligonucleotide"
  source: /note="Sense strand starting at position 2054 of SEQ ID NO: 115"
uuugucucauuggaaauga

SEQ ID NO: 5120 - RNA, 19 nt, Artificial Sequence
  source: /note="Description of Artificial Sequence: Synthetic oligonucleotide"
  source: /note="Antisense strand to SEQ ID NO: 5119"
ucauuuccaaugagacaaa

SEQ ID NO: 5121 - RNA, 19 nt, Artificial Sequence
  source: /note="Description of Artificial Sequence: Synthetic oligonucleotide"
  source: /note="Sense strand starting at position 2054 of SEQ ID NO: 137"
ggaagccuuuaccaaacau

SEQ ID NO: 5122 - RNA, 19 nt, Artificial Sequence
  source: /note="Description of Artificial Sequence: Synthetic oligonucleotide"
  source: /note="Antisense strand to SEQ ID NO: 5121"
auguuugguaaaggcuucc

SEQ ID NO: 5123 - RNA, 19 nt, Artificial Sequence
  source: /note="Description of Artificial Sequence: Synthetic oligonucleotide"
  source: /note="Sense strand starting at position 2054 of SEQ ID NO: 209"
cccauugcacuguguaaau

SEQ ID NO: 5124 - RNA, 19 nt, Artificial Sequence
  source: /note="Description of Artificial Sequence: Synthetic oligonucleotide"
  source: /note="Antisense strand to SEQ ID NO: 5123"
auuuacacagugcaauggg

SEQ ID NO: 5125 - RNA, 19 nt, Artificial Sequence
  source: /note="Description of Artificial Sequence: Synthetic oligonucleotide"
  source: /note="Sense strand starting at position 2054 of SEQ ID NO: 218"
cuguguaaauccuugcaga

SEQ ID NO: 5126 - RNA, 19 nt, Artificial Sequence
  source: /note="Description of Artificial Sequence: Synthetic oligonucleotide"
  source: /note="Antisense strand to SEQ ID NO: 5125"
ucugcaaggauuuacacag

SEQ ID NO: 5127 - RNA, 19 nt, Artificial Sequence
  source: /note="Description of Artificial Sequence: Synthetic oligonucleotide"
  source: /note="Sense strand starting at position 2054 of SEQ ID NO: 219"
uguguaaauccuugcagag

SEQ ID NO: 5128 - RNA, 19 nt, Artificial Sequence
  source: /note="Description of Artificial Sequence: Synthetic oligonucleotide"
  source: /note="Antisense strand to SEQ ID NO: 5127"
cucugcaaggauuuacaca

SEQ ID NO: 5129 - RNA, 19 nt, Artificial Sequence
  source: /note="Description of Artificial Sequence: Synthetic oligonucleotide"
  source: /note="Sense strand starting at position 2054 of SEQ ID NO: 221"
uguaaauccuugcagagag

SEQ ID NO: 5130 - RNA, 19 nt, Artificial Sequence
  source: /note="Description of Artificial Sequence: Synthetic oligonucleotide"
  source: /note="Antisense strand to SEQ ID NO: 5129"
cucucugcaaggauuuaca

SEQ ID NO: 5131 - RNA, 19 nt, Artificial Sequence
  source: /note="Description of Artificial Sequence: Synthetic oligonucleotide"
  source: /note="Sense strand starting at position 2054 of SEQ ID NO: 235"
gagagaagauccugcaaga

SEQ ID NO: 5132 - RNA, 19 nt, Artificial Sequence
  source: /note="Description of Artificial Sequence: Synthetic oligonucleotide"
  source: /note="Antisense strand to SEQ ID NO: 5131"
ucuugcaggaucuucucuc

SEQ ID NO: 5133 - RNA, 19 nt, Artificial Sequence
  source: /note="Description of Artificial Sequence: Synthetic oligonucleotide"
  source: /note="Sense strand starting at position 2054 of SEQ ID NO: 331"
ucauuuccaucuuagguua

SEQ ID NO: 5134 - RNA, 19 nt, Artificial Sequence
  source: /note="Description of Artificial Sequence: Synthetic oligonucleotide"
  source: /note="Antisense strand to SEQ ID NO: 5133"
uaaccuaagauggaaauga

SEQ ID NO: 5135 - RNA, 19 nt, Artificial Sequence
  source: /note="Description of Artificial Sequence: Synthetic oligonucleotide"
  source: /note="Sense strand starting at position 2054 of SEQ ID NO: 355"
ggaccugaguaugaagacu

SEQ ID NO: 5136 - RNA, 19 nt, Artificial Sequence
  source: /note="Description of Artificial Sequence: Synthetic oligonucleotide"
  source: /note="Antisense strand to SEQ ID NO: 5135"
agucuucauacucaggucc

SEQ ID NO: 5137 - RNA, 19 nt, Artificial Sequence
  source: /note="Description of Artificial Sequence: Synthetic oligonucleotide"
  source: /note="Sense strand starting at position 2054 of SEQ ID NO: 395"
ggaaccuucucuugcauuu

SEQ ID NO: 5138 - RNA, 19 nt, Artificial Sequence
  source: /note="Description of Artificial Sequence: Synthetic oligonucleotide"
  source: /note="Antisense strand to SEQ ID NO: 5137"
aaaugcaagagaagguucc

SEQ ID NO: 5139 - RNA, 19 nt, Artificial Sequence
  source: /note="Description of Artificial Sequence: Synthetic oligonucleotide"
  source: /note="Sense strand starting at position 2054 of SEQ ID NO: 646"
cuuuaauggucacaaggcu

SEQ ID NO: 5140 - RNA, 19 nt, Artificial Sequence
  source: /note="Description of Artificial Sequence: Synthetic oligonucleotide"
  source: /note="Antisense strand to SEQ ID NO: 5139"
agccuugugaccauuaaag

SEQ ID NO: 5141 - RNA, 19 nt, Artificial Sequence
  source: /note="Description of Artificial Sequence: Synthetic oligonucleotide"
  source: /note="Sense strand starting at position 2054 of SEQ ID NO: 662"
gcuuaauggucacaaggug

SEQ ID NO: 5142 - RNA, 19 nt, Artificial Sequence
  source: /note="Description of Artificial Sequence: Synthetic oligonucleotide"
  source: /note="Antisense strand to SEQ ID NO: 5141"
caccuugugaccauuaagc

SEQ ID NO: 5143 - RNA, 19 nt, Artificial Sequence
  source: /note="Description of Artificial Sequence: Synthetic oligonucleotide"
  source: /note="Sense strand starting at position 2054 of SEQ ID NO: 701"
ccaggagcuucuuagguca

SEQ ID NO: 5144 - RNA, 19 nt, Artificial Sequence
  source: /note="Description of Artificial Sequence: Synthetic oligonucleotide"
  source: /note="Antisense strand to SEQ ID NO: 5143"
ugaccuaagaagcuccugg

SEQ ID NO: 5145 - RNA, 19 nt, Artificial Sequence
  source: /note="Description of Artificial Sequence: Synthetic oligonucleotide"
  source: /note="Sense strand starting at position 2054 of SEQ ID NO: 703"
aggagcuucuuaggucaau

SEQ ID NO: 5146 - RNA, 19 nt, Artificial Sequence
  source: /note="Description of Artificial Sequence: Synthetic oligonucleotide"
  source: /note="Antisense strand to SEQ ID NO: 5145"
auugaccuaagaagcuccu

SEQ ID NO: 5147 - RNA, 19 nt, Artificial Sequence
  source: /note="Description of Artificial Sequence: Synthetic oligonucleotide"
  source: /note="Sense strand starting at position 2054 of SEQ ID NO: 734"
acauacugcuuauauggua

SEQ ID NO: 5148 - RNA, 19 nt, Artificial Sequence
  source: /note="Description of Artificial Sequence: Synthetic oligonucleotide"
  source: /note="Antisense strand to SEQ ID NO: 5147"
uaccauauaagcaguaugu

SEQ ID NO: 5149 - RNA, 19 nt, Artificial Sequence
  source: /note="Description of Artificial Sequence: Synthetic oligonucleotide"
  source: /note="Sense strand starting at position 2054 of SEQ ID NO: 756"
gcaccaauauuagaagugu

SEQ ID NO: 5150 - RNA, 19 nt, Artificial Sequence
  source: /note="Description of Artificial Sequence: Synthetic oligonucleotide"
  source: /note="Antisense strand to SEQ ID NO: 5149"
acacuucuaauauuggugc

SEQ ID NO: 5151 - RNA, 19 nt, Artificial Sequence
  source: /note="Description of Artificial Sequence: Synthetic oligonucleotide"
  source: /note="Sense strand starting at position 2054 of SEQ ID NO: 765"
uuagaaguguuucccagca

SEQ ID NO: 5152 - RNA, 19 nt, Artificial Sequence
  source: /note="Description of Artificial Sequence: Synthetic oligonucleotide"
  source: /note="Antisense strand to SEQ ID NO: 5151"
ugcugggaaacacuucuaa

SEQ ID NO: 5153 - RNA, 19 nt, Artificial Sequence
  source: /note="Description of Artificial Sequence: Synthetic oligonucleotide"
  source: /note="Sense strand starting at position 2054 of SEQ ID NO: 767"
agaaguguuucccagcaca

SEQ ID NO: 5154 - RNA, 19 nt, Artificial Sequence
  source: /note="Description of Artificial Sequence: Synthetic oligonucleotide"
  source: /note="Antisense strand to SEQ ID NO: 5153"
ugugcugggaaacacuucu

SEQ ID NO: 5155 - RNA, 19 nt, Artificial Sequence
  source: /note="Description of Artificial Sequence: Synthetic oligonucleotide"
  source: /note="Sense strand starting at position 2054 of SEQ ID NO: 838"
aaggcauucuuguguccua

SEQ ID NO: 5156 - RNA, 19 nt, Artificial Sequence
  source: /note="Description of Artificial Sequence: Synthetic oligonucleotide"
  source: /note="Antisense strand to SEQ ID NO: 5155"
uaggacacaagaaugccuu

SEQ ID NO: 5157 - RNA, 19 nt, Artificial Sequence
  source: /note="Description of Artificial Sequence: Synthetic oligonucleotide"
  source: /note="Sense strand starting at position 2054 of SEQ ID NO: 841"
gcauucuuguguccuagca

SEQ ID NO: 5158 - RNA, 19 nt, Artificial Sequence
  source: /note="Description of Artificial Sequence: Synthetic oligonucleotide"
  source: /note="Antisense strand to SEQ ID NO: 5157"
ugcuaggacacaagaaugc

SEQ ID NO: 5159 - RNA, 19 nt, Artificial Sequence
  source: /note="Description of Artificial Sequence: Synthetic oligonucleotide"
  source: /note="Sense strand starting at position 2054 of SEQ ID NO: 843"
auucuuguguccuagcaau

SEQ ID NO: 5160 - RNA, 19 nt, Artificial Sequence
  source: /note="Description of Artificial Sequence: Synthetic oligonucleotide"
  source: /note="Antisense strand to SEQ ID NO: 5159"
auugcuaggacacaagaau

SEQ ID NO: 5161 - RNA, 19 nt, Artificial Sequence
  source: /note="Description of Artificial Sequence: Synthetic oligonucleotide"
  source: /note="Sense strand starting at position 2054 of SEQ ID NO: 1048"
uagagauauuccuguguug

SEQ ID NO: 5162 - RNA, 19 nt, Artificial Sequence
  source: /note="Description of Artificial Sequence: Synthetic oligonucleotide"
  source: /note="Antisense strand to SEQ ID NO: 5161"
caacacaggaauaucucua

SEQ ID NO: 5163 - RNA, 19 nt, Artificial Sequence
  source: /note="Description of Artificial Sequence: Synthetic oligonucleotide"
  source: /note="Sense strand starting at position 2054 of SEQ ID NO: 1053"
auauuccuguguuggauau

SEQ ID NO: 5164 - RNA, 19 nt, Artificial Sequence
  source: /note="Description of Artificial Sequence: Synthetic oligonucleotide"
  source: /note="Antisense strand to SEQ ID NO: 5163"
auauccaacacaggaauau

SEQ ID NO: 5165 - RNA, 19 nt, Artificial Sequence
  source: /note="Description of Artificial Sequence: Synthetic oligonucleotide"
  source: /note="Sense strand starting at position 2054 of SEQ ID NO: 1054"
uauuccuguguuggauauu

SEQ ID NO: 5166 - RNA, 19 nt, Artificial Sequence
  source: /note="Description of Artificial Sequence: Synthetic oligonucleotide"
  source: /note="Antisense strand to SEQ ID NO: 5165"
aauauccaacacaggaaua

SEQ ID NO: 5167 - RNA, 19 nt, Artificial Sequence
  source: /note="Description of Artificial Sequence: Synthetic oligonucleotide"
  source: /note="Sense strand starting at position 2054 of SEQ ID NO: 1055"
auuccuguguuggauauua

SEQ ID NO: 5168 - RNA, 19 nt, Artificial Sequence
  source: /note="Description of Artificial Sequence: Synthetic oligonucleotide"
  source: /note="Antisense strand to SEQ ID NO: 5167"
uaauauccaacacaggaau

SEQ ID NO: 5169 - RNA, 19 nt, Artificial Sequence
  source: /note="Description of Artificial Sequence: Synthetic oligonucleotide"
  source: /note="Sense strand starting at position 2054 of SEQ ID NO: 1121"
auauucucgcucugauaca

SEQ ID NO: 5170 - RNA, 19 nt, Artificial Sequence
  source: /note="Description of Artificial Sequence: Synthetic oligonucleotide"
  source: /note="Antisense strand to SEQ ID NO: 5169"
uguaucagagcgagaauau

SEQ ID NO: 5171 - RNA, 19 nt, Artificial Sequence
  source: /note="Description of Artificial Sequence: Synthetic oligonucleotide"
  source: /note="Sense strand starting at position 2054 of SEQ ID NO: 1348"
cuuggagucuccguguuca

SEQ ID NO: 5172 - RNA, 19 nt, Artificial Sequence
  source: /note="Description of Artificial Sequence: Synthetic oligonucleotide"
  source: /note="Antisense strand to SEQ ID NO: 5171"
ugaacacggagacuccaag

SEQ ID NO: 5173 - RNA, 19 nt, Artificial Sequence
  source: /note="Description of Artificial Sequence: Synthetic oligonucleotide"
  source: /note="Sense strand starting at position 2054 of SEQ ID NO: 1393"
agcaaacuuugcgcacauu

SEQ ID NO: 5174 - RNA, 19 nt, Artificial Sequence
  source: /note="Description of Artificial Sequence: Synthetic oligonucleotide"
  source: /note="Antisense strand to SEQ ID NO: 5173"
aaugugcgcaaaguuugcu

SEQ ID NO: 5175 - RNA, 19 nt, Artificial Sequence
  source: /note="Description of Artificial Sequence: Synthetic oligonucleotide"
  source: /note="Sense strand starting at position 2054 of SEQ ID NO: 1404"
cgcacauuuccgcgggcua

SEQ ID NO: 5176 - RNA, 19 nt, Artificial Sequence
  source: /note="Description of Artificial Sequence: Synthetic oligonucleotide"
  source: /note="Antisense strand to SEQ ID NO: 5175"
uagcccgcggaaaugugcg

SEQ ID NO: 5177 - RNA, 19 nt, Artificial Sequence
  source: /note="Description of Artificial Sequence: Synthetic oligonucleotide"
  source: /note="Sense strand starting at position 2054 of SEQ ID NO: 1689"
ggcugcaucuacucacuua

SEQ ID NO: 5178 - RNA, 19 nt, Artificial Sequence
  source: /note="Description of Artificial Sequence: Synthetic oligonucleotide"
  source: /note="Antisense strand to SEQ ID NO: 5177"
uaagugaguagaugcagcc

SEQ ID NO: 5179 - RNA, 19 nt, Artificial Sequence
  source: /note="Description of Artificial Sequence: Synthetic oligonucleotide"
  source: /note="Sense strand starting at position 2054 of SEQ ID NO: 1705"
uuaggaguucuccgcgucu

SEQ ID NO: 5180 - RNA, 19 nt, Artificial Sequence
  source: /note="Description of Artificial Sequence: Synthetic oligonucleotide"
  source: /note="Antisense strand to SEQ ID NO: 5179"
agacgcggagaacuccuaa

SEQ ID NO: 5181 - RNA, 19 nt, Artificial Sequence
  source: /note="Description of Artificial Sequence: Synthetic oligonucleotide"
  source: /note="Sense strand starting at position 2054 of SEQ ID NO: 1707"
aggaguucuccgcgucugu

SEQ ID NO: 5182 - RNA, 19 nt, Artificial Sequence
  source: /note="Description of Artificial Sequence: Synthetic oligonucleotide"
  source: /note="Antisense strand to SEQ ID NO: 5181"
acagacgcggagaacuccu

SEQ ID NO: 5183 - RNA, 19 nt, Artificial Sequence
  source: /note="Description of Artificial Sequence: Synthetic oligonucleotide"
  source: /note="Sense strand starting at position 2054 of SEQ ID NO: 2048"
ccgcgcucgcuuugguaua

SEQ ID NO: 5184 - RNA, 19 nt, Artificial Sequence
  source: /note="Description of Artificial Sequence: Synthetic oligonucleotide"
  source: /note="Antisense strand to SEQ ID NO: 5183"
uauaccaaagcgagcgcgg

SEQ ID NO: 5185 - RNA, 19 nt, Artificial Sequence
  source: /note="Description of Artificial Sequence: Synthetic oligonucleotide"
  source: /note="Sense strand starting at position 2054 of SEQ ID NO: 2049"
cgcgcucgcuuugguauau

SEQ ID NO: 5186 - RNA, 19 nt, Artificial Sequence
  source: /note="Description of Artificial Sequence: Synthetic oligonucleotide"
  source: /note="Antisense strand to SEQ ID NO: 5185"
auauaccaaagcgagcgcg

SEQ ID NO: 5187 - RNA, 19 nt, Artificial Sequence
  source: /note="Description of Artificial Sequence: Synthetic oligonucleotide"
  source: /note="Sense strand starting at position 2054 of SEQ ID NO: 2050"
gcgcucgcuuugguauauu

SEQ ID NO: 5188 - RNA, 19 nt, Artificial Sequence
  source: /note="Description of Artificial Sequence: Synthetic oligonucleotide"
  source: /note="Antisense strand to SEQ ID NO: 5187"
aauauaccaaagcgagcgc

SEQ ID NO: 5189 - RNA, 19 nt, Artificial Sequence
  source: /note="Description of Artificial Sequence: Synthetic oligonucleotide"
  source: /note="Sense strand starting at position 2054 of SEQ ID NO: 2060"
ugguauauuuccgaccuga

SEQ ID NO: 5190 - RNA, 19 nt, Artificial Sequence
  source: /note="Description of Artificial Sequence: Synthetic oligonucleotide"
  source: /note="Antisense strand to SEQ ID NO: 5189"
ucaggucggaaauauacca

SEQ ID NO: 5191 - RNA, 19 nt, Artificial Sequence
  source: /note="Description of Artificial Sequence: Synthetic oligonucleotide"
  source: /note="Sense strand starting at position 2054 of SEQ ID NO: 2467"
acgcaguucgggugggauu

SEQ ID NO: 5192 - RNA, 19 nt, Artificial Sequence
  source: /note="Description of Artificial Sequence: Synthetic oligonucleotide"
  source: /note="Antisense strand to SEQ ID NO: 5191"
aaucccacccgaacugcgu

SEQ ID NO: 5193 - RNA, 19 nt, Artificial Sequence
  source: /note="Description of Artificial Sequence: Synthetic oligonucleotide"
  source: /note="Sense strand starting at position 2054 of SEQ ID NO: 2840"
gcgccuucugcagaaaggu

SEQ ID NO: 5194 - RNA, 19 nt, Artificial Sequence
  source: /note="Description of Artificial Sequence: Synthetic oligonucleotide"
  source: /note="Antisense strand to SEQ ID NO: 5193"
accuuucugcagaaggcgc

SEQ ID NO: 5195 - RNA, 19 nt, Artificial Sequence
  source: /note="Description of Artificial Sequence: Synthetic oligonucleotide"
  source: /note="Sense strand starting at position 2054 of SEQ ID NO: 2948"
uaaaucgaucuucguuuga

SEQ ID NO: 5196 - RNA, 19 nt, Artificial Sequence
  source: /note="Description of Artificial Sequence: Synthetic oligonucleotide"
  source: /note="Antisense strand to SEQ ID NO: 5195"
ucaaacgaagaucgauuua

SEQ ID NO: 5197 - RNA, 19 nt, Artificial Sequence
  source: /note="Description of Artificial Sequence: Synthetic oligonucleotide"
  source: /note="Sense strand starting at position 2054 of SEQ ID NO: 2952"
ucgaucuucguuugaaaca

SEQ ID NO: 5198 - RNA, 19 nt, Artificial Sequence
  source: /note="Description of Artificial Sequence: Synthetic oligonucleotide"
  source: /note="Antisense strand to SEQ ID NO: 5197"
uguuucaaacgaagaucga

SEQ ID NO: 5199 - RNA, 19 nt, Artificial Sequence
  source: /note="Description of Artificial Sequence: Synthetic oligonucleotide"
  source: /note="Sense strand starting at position 2054 of SEQ ID NO: 2953"
cgaucuucguuugaaacac

SEQ ID NO: 5200 - RNA, 19 nt, Artificial Sequence
  source: /note="Description of Artificial Sequence: Synthetic oligonucleotide"
  source: /note="Antisense strand to SEQ ID NO: 5199"
guguuucaaacgaagaucg

SEQ ID NO: 5201 - RNA, 19 nt, Artificial Sequence
  source: /note="Description of Artificial Sequence: Synthetic oligonucleotide"
  source: /note="Sense strand starting at position 2054 of SEQ ID NO: 3196"
cagggagcuuucuagcaaa

SEQ ID NO: 5202 - RNA, 19 nt, Artificial Sequence
  source: /note="Description of Artificial Sequence: Synthetic oligonucleotide"
  source: /note="Antisense strand to SEQ ID NO: 5201"
uuugcuagaaagcucccug

SEQ ID NO: 5203 - RNA, 19 nt, Artificial Sequence
  source: /note="Description of Artificial Sequence: Synthetic oligonucleotide"
  source: /note="Sense strand starting at position 2054 of SEQ ID NO: 3199"
ggagcuuucuagcaaagga

SEQ ID NO: 5204 - RNA, 19 nt, Artificial Sequence
  source: /note="Description of Artificial Sequence: Synthetic oligonucleotide"
  source: /note="Antisense strand to SEQ ID NO: 5203"
uccuuugcuagaaagcucc

SEQ ID NO: 5205 - RNA, 19 nt, Artificial Sequence
  source: /note="Description of Artificial Sequence: Synthetic oligonucleotide"
  source: /note="Sense strand starting at position 2054 of SEQ ID NO: 3435"
cccuacucguguucucagu

SEQ ID NO: 5206 - RNA, 19 nt, Artificial Sequence
  source: /note="Description of Artificial Sequence: Synthetic oligonucleotide"
  source: /note="Antisense strand to SEQ ID NO: 5205"
acugagaacacgaguaggg

SEQ ID NO: 5207 - RNA, 19 nt, Artificial Sequence
  source: /note="Description of Artificial Sequence: Synthetic oligonucleotide"
  source: /note="Sense strand starting at position 2054 of SEQ ID NO: 3457"
ggccgauggcuccguggaa

SEQ ID NO: 5208 - RNA, 19 nt, Artificial Sequence
  source: /note="Description of Artificial Sequence: Synthetic oligonucleotide"
  source: /note="Antisense strand to SEQ ID NO: 5207"
uuccacggagccaucggcc

SEQ ID NO: 5209 - RNA, 19 nt, Artificial Sequence
  source: /note="Description of Artificial Sequence: Synthetic oligonucleotide"
  source: /note="Sense strand starting at position 2054 of SEQ ID NO: 3815"
ggcgaagaauagcauauua

SEQ ID NO: 5210 - RNA, 19 nt, Artificial Sequence
  source: /note="Description of Artificial Sequence: Synthetic oligonucleotide"
  source: /note="Antisense strand to SEQ ID NO: 5209"
uaauaugcuauucuucgcc

SEQ ID NO: 5211 - RNA, 19 nt, Artificial Sequence
  source: /note="Description of Artificial Sequence: Synthetic oligonucleotide"
  source: /note="Sense strand starting at position 2054 of SEQ ID NO: 3870"
agcgauuccaugcgaacga

SEQ ID NO: 5212 - RNA, 19 nt, Artificial Sequence
  source: /note="Description of Artificial Sequence: Synthetic oligonucleotide"
  source: /note="Antisense strand to SEQ ID NO: 5211"
ucguucgcauggaaucgcu

SEQ ID NO: 5213 - RNA, 19 nt, Artificial Sequence
  source: /note="Description of Artificial Sequence: Synthetic oligonucleotide"
  source: /note="Sense strand starting at position 2054 of SEQ ID NO: 3871"
gcgauuccaugcgaacgaa

SEQ ID NO: 5214 - RNA, 19 nt, Artificial Sequence
  source: /note="Description of Artificial Sequence: Synthetic oligonucleotide"
  source: /note="Antisense strand to SEQ ID NO: 5213"
uucguucgcauggaaucgc

SEQ ID NO: 5215 - RNA, 19 nt, Artificial Sequence
  source: /note="Description of Artificial Sequence: Synthetic oligonucleotide"
  source: /note="Sense strand starting at position 2055 of SEQ ID NO: 139"
cucuuaggcuuguauuuga

SEQ ID NO: 5216 - RNA, 19 nt, Artificial Sequence
  source: /note="Description of Artificial Sequence: Synthetic oligonucleotide"
  source: /note="Antisense strand to SEQ ID NO: 5215"
ucaaauacaagccuaagag

SEQ ID NO: 5217 - RNA, 19 nt, Artificial Sequence
  source: /note="Description of Artificial Sequence: Synthetic oligonucleotide"
  source: /note="Sense strand starting at position 2055 of SEQ ID NO: 146"
gcuuguauuugaggcugga

SEQ ID NO: 5218 - RNA, 19 nt, Artificial Sequence
  source: /note="Description of Artificial Sequence: Synthetic oligonucleotide"
  source: /note="Antisense strand to SEQ ID NO: 5217"
uccagccucaaauacaagc

SEQ ID NO: 5219 - RNA, 19 nt, Artificial Sequence
  source: /note="Description of Artificial Sequence: Synthetic oligonucleotide"
  source: /note="Sense strand starting at position 2055 of SEQ ID NO: 220"
gggccaagagaguguuugu

SEQ ID NO: 5220 - RNA, 19 nt, Artificial Sequence
  source: /note="Description of Artificial Sequence: Synthetic oligonucleotide"
  source: /note="Antisense strand to SEQ ID NO: 5219"
acaaacacucucuuggccc

SEQ ID NO: 5221 - RNA, 19 nt, Artificial Sequence
  source: /note="Description of Artificial Sequence: Synthetic oligonucleotide"
  source: /note="Sense strand starting at position 2055 of SEQ ID NO: 226"
agagaguguuuguguggga

SEQ ID NO: 5222 - RNA, 19 nt, Artificial Sequence
  source: /note="Description of Artificial Sequence: Synthetic oligonucleotide"
  source: /note="Antisense strand to SEQ ID NO: 5221"
ucccacacaaacacucucu

SEQ ID NO: 5223 - RNA, 19 nt, Artificial Sequence
  source: /note="Description of Artificial Sequence: Synthetic oligonucleotide"
  source: /note="Sense strand starting at position 2055 of SEQ ID NO: 228"
agaguguuugugugggagu

SEQ ID NO: 5224 - RNA, 19 nt, Artificial Sequence
  source: /note="Description of Artificial Sequence: Synthetic oligonucleotide"
  source: /note="Antisense strand to SEQ ID NO: 5223"
acucccacacaaacacucu

SEQ ID NO: 5225 - RNA, 19 nt, Artificial Sequence
  source: /note="Description of Artificial Sequence: Synthetic oligonucleotide"
  source: /note="Sense strand starting at position 2055 of SEQ ID NO: 229"
gaguguuugugugggaguu

SEQ ID NO: 5226 - RNA, 19 nt, Artificial Sequence
  source: /note="Description of Artificial Sequence: Synthetic oligonucleotide"
  source: /note="Antisense strand to SEQ ID NO: 5225"
aacucccacacaaacacuc

SEQ ID NO: 5227 - RNA, 19 nt, Artificial Sequence
  source: /note="Description of Artificial Sequence: Synthetic oligonucleotide"
  source: /note="Sense strand starting at position 2055 of SEQ ID NO: 230"
aguguuugugugggaguua

SEQ ID NO: 5228 - RNA, 19 nt, Artificial Sequence
  source: /note="Description of Artificial Sequence: Synthetic oligonucleotide"
  source: /note="Antisense strand to SEQ ID NO: 5227"
uaacucccacacaaacacu

SEQ ID NO: 5229 - RNA, 19 nt, Artificial Sequence
  source: /note="Description of Artificial Sequence: Synthetic oligonucleotide"
  source: /note="Sense strand starting at position 2055 of SEQ ID NO: 311"
ggccuacugucccugcuau

SEQ ID NO: 5230 - RNA, 19 nt, Artificial Sequence
  source: /note="Description of Artificial Sequence: Synthetic oligonucleotide"
  source: /note="Antisense strand to SEQ ID NO: 5229"
auagcagggacaguaggcc

SEQ ID NO: 5231 - RNA, 19 nt, Artificial Sequence
  source: /note="Description of Artificial Sequence: Synthetic oligonucleotide"
  source: /note="Sense strand starting at position 2055 of SEQ ID NO: 558"
gugucagaggcuugucuag

SEQ ID NO: 5232 - RNA, 19 nt, Artificial Sequence
  source: /note="Description of Artificial Sequence: Synthetic oligonucleotide"
  source: /note="Antisense strand to SEQ ID NO: 5231"
cuagacaagccucugacac

SEQ ID NO: 5233 - RNA, 19 nt, Artificial Sequence
  source: /note="Description of Artificial Sequence: Synthetic oligonucleotide"
  source: /note="Sense strand starting at position 2055 of SEQ ID NO: 560"
gucagaggcuugucuaggu

SEQ ID NO: 5234 - RNA, 19 nt, Artificial Sequence
  source: /note="Description of Artificial Sequence: Synthetic oligonucleotide"
  source: /note="Antisense strand to SEQ ID NO: 5233"
accuagacaagccucugac

SEQ ID NO: 5235 - RNA, 19 nt, Artificial Sequence
  source: /note="Description of Artificial Sequence: Synthetic oligonucleotide"
  source: /note="Sense strand starting at position 2055 of SEQ ID NO: 627"
acagguguccgcugucauc

SEQ ID NO: 5236 - RNA, 19 nt, Artificial Sequence
  source: /note="Description of Artificial Sequence: Synthetic oligonucleotide"
  source: /note="Antisense strand to SEQ ID NO: 5235"
gaugacagcggacaccugu

SEQ ID NO: 5237 - RNA, 19 nt, Artificial Sequence
  source: /note="Description of Artificial Sequence: Synthetic oligonucleotide"
  source: /note="Sense strand starting at position 2055 of SEQ ID NO: 648"
caagguugugccugccaca

SEQ ID NO: 5238 - RNA, 19 nt, Artificial Sequence
  source: /note="Description of Artificial Sequence: Synthetic oligonucleotide"
  source: /note="Antisense strand to SEQ ID NO: 5237"
uguggcaggcacaaccuug

SEQ ID NO: 5239 - RNA, 19 nt, Artificial Sequence
  source: /note="Description of Artificial Sequence: Synthetic oligonucleotide"
  source: /note="Sense strand starting at position 2055 of SEQ ID NO: 668"
gagaccuguuuguacaaau

SEQ ID NO: 5240 - RNA, 19 nt, Artificial Sequence
  source: /note="Description of Artificial Sequence: Synthetic oligonucleotide"
  source: /note="Antisense strand to SEQ ID NO: 5239"
auuuguacaaacaggucuc

SEQ ID NO: 5241 - RNA, 19 nt, Artificial Sequence
  source: /note="Description of Artificial Sequence: Synthetic oligonucleotide"
  source: /note="Sense strand starting at position 2055 of SEQ ID NO: 753"
gguccuaucucccaauaga

SEQ ID NO: 5242 - RNA, 19 nt, Artificial Sequence
  source: /note="Description of Artificial Sequence: Synthetic oligonucleotide"
  source: /note="Antisense strand to SEQ ID NO: 5241"
ucuauugggagauaggacc

SEQ ID NO: 5243 - RNA, 19 nt, Artificial Sequence
  source: /note="Description of Artificial Sequence: Synthetic oligonucleotide"
  source: /note="Sense strand starting at position 2055 of SEQ ID NO: 829"
gacccacgucuaggaguuu

SEQ ID NO: 5244 - RNA, 19 nt, Artificial Sequence
  source: /note="Description of Artificial Sequence: Synthetic oligonucleotide"
  source: /note="Antisense strand to SEQ ID NO: 5243"
aaacuccuagacguggguc

SEQ ID NO: 5245 - RNA, 19 nt, Artificial Sequence
  source: /note="Description of Artificial Sequence: Synthetic oligonucleotide"
  source: /note="Sense strand starting at position 2055 of SEQ ID NO: 853"
gagacacaaugugaacauu

SEQ ID NO: 5246 - RNA, 19 nt, Artificial Sequence
  source: /note="Description of Artificial Sequence: Synthetic oligonucleotide"
  source: /note="Antisense strand to SEQ ID NO: 5245"
aauguucacauugugucuc

SEQ ID NO: 5247 - RNA, 19 nt, Artificial Sequence
  source: /note="Description of Artificial Sequence: Synthetic oligonucleotide"
  source: /note="Sense strand starting at position 2055 of SEQ ID NO: 861"
augugaacauuggcgugua

SEQ ID NO: 5248 - RNA, 19 nt, Artificial Sequence
  source: /note="Description of Artificial Sequence: Synthetic oligonucleotide"
  source: /note="Antisense strand to SEQ ID NO: 5247"
uacacgccaauguucacau

SEQ ID NO: 5249 - RNA, 19 nt, Artificial Sequence
  source: /note="Description of Artificial Sequence: Synthetic oligonucleotide"
  source: /note="Sense strand starting at position 2055 of SEQ ID NO: 862"
ugugaacauuggcguguau

SEQ ID NO: 5250 - RNA, 19 nt, Artificial Sequence
  source: /note="Description of Artificial Sequence: Synthetic oligonucleotide"
  source: /note="Antisense strand to SEQ ID NO: 5249"
auacacgccaauguucaca

SEQ ID NO: 5251 - RNA, 19 nt, Artificial Sequence
  source: /note="Description of Artificial Sequence: Synthetic oligonucleotide"
  source: /note="Sense strand starting at position 2055 of SEQ ID NO: 1001"
cucagauauuuccgaauua

SEQ ID NO: 5252 - RNA, 19 nt, Artificial Sequence
  source: /note="Description of Artificial Sequence: Synthetic oligonucleotide"
  source: /note="Antisense strand to SEQ ID NO: 5251"
uaauucggaaauaucugag

SEQ ID NO: 5253 - RNA, 19 nt, Artificial Sequence
  source: /note="Description of Artificial Sequence: Synthetic oligonucleotide"
  source: /note="Sense strand starting at position 2055 of SEQ ID NO: 1337"
gcagaagugugugaacaga

SEQ ID NO: 5254 - RNA, 19 nt, Artificial Sequence
  source: /note="Description of Artificial Sequence: Synthetic oligonucleotide"
  source: /note="Antisense strand to SEQ ID NO: 5253"
ucuguucacacacuucugc

SEQ ID NO: 5255 - RNA, 19 nt, Artificial Sequence
  source: /note="Description of Artificial Sequence: Synthetic oligonucleotide"
  source: /note="Sense strand starting at position 2055 of SEQ ID NO: 1660"
cgcucacaggucggaauaa

SEQ ID NO: 5256 - RNA, 19 nt, Artificial Sequence
  source: /note="Description of Artificial Sequence: Synthetic oligonucleotide"
  source: /note="Antisense strand to SEQ ID NO: 5255"
uuauuccgaccugugagcg

SEQ ID NO: 5257 - RNA, 19 nt, Artificial Sequence
  source: /note="Description of Artificial Sequence: Synthetic oligonucleotide"
  source: /note="Sense strand starting at position 2055 of SEQ ID NO: 1661"
gcucacaggucggaauaau

SEQ ID NO: 5258 - RNA, 19 nt, Artificial Sequence
  source: /note="Description of Artificial Sequence: Synthetic oligonucleotide"
  source: /note="Antisense strand to SEQ ID NO: 5257"
auuauuccgaccugugagc

SEQ ID NO: 5259 - RNA, 19 nt, Artificial Sequence
  source: /note="Description of Artificial Sequence: Synthetic oligonucleotide"
  source: /note="Sense strand starting at position 2055 of SEQ ID NO: 1772"
ugaaaugauuaaggaacua

SEQ ID NO: 5260 - RNA, 19 nt, Artificial Sequence
  source: /note="Description of Artificial Sequence: Synthetic oligonucleotide"
  source: /note="Antisense strand to SEQ ID NO: 5259"
uaguuccuuaaucauuuca

SEQ ID NO: 5261 - RNA, 19 nt, Artificial Sequence
  source: /note="Description of Artificial Sequence: Synthetic oligonucleotide"
  source: /note="Sense strand starting at position 2055 of SEQ ID NO: 1792"
agagcuucucgccauguga

SEQ ID NO: 5262 - RNA, 19 nt, Artificial Sequence
  source: /note="Description of Artificial Sequence: Synthetic oligonucleotide"
  source: /note="Antisense strand to SEQ ID NO: 5261"
ucacauggcgagaagcucu

SEQ ID NO: 5263 - RNA, 19 nt, Artificial Sequence
  source: /note="Description of Artificial Sequence: Synthetic oligonucleotide"
  source: /note="Sense strand starting at position 2055 of SEQ ID NO: 1794"
agcuucucgccaugugaga

SEQ ID NO: 5264 - RNA, 19 nt, Artificial Sequence
  source: /note="Description of Artificial Sequence: Synthetic oligonucleotide"
  source: /note="Antisense strand to SEQ ID NO: 5263"
ucucacauggcgagaagcu

SEQ ID NO: 5265 - RNA, 19 nt, Artificial Sequence
  source: /note="Description of Artificial Sequence: Synthetic oligonucleotide"
  source: /note="Sense strand starting at position 2055 of SEQ ID NO: 1807"
gugagaucauguccuguuc

SEQ ID NO: 5266 - RNA, 19 nt, Artificial Sequence
  source: /note="Description of Artificial Sequence: Synthetic oligonucleotide"
  source: /note="Antisense strand to SEQ ID NO: 5265"
gaacaggacaugaucucac

SEQ ID NO: 5267 - RNA, 19 nt, Artificial Sequence
  source: /note="Description of Artificial Sequence: Synthetic oligonucleotide"
  source: /note="Sense strand starting at position 2055 of SEQ ID NO: 2135"
cgcaccuucuauuaagaca

SEQ ID NO: 5268 - RNA, 19 nt, Artificial Sequence
  source: /note="Description of Artificial Sequence: Synthetic oligonucleotide"
  source: /note="Antisense strand to SEQ ID NO: 5267"
ugucuuaauagaaggugcg

SEQ ID NO: 5269 - RNA, 19 nt, Artificial Sequence
  source: /note="Description of Artificial Sequence: Synthetic oligonucleotide"
  source: /note="Sense strand starting at position 2055 of SEQ ID NO: 2196"
gugacaucuccaugugcaa

SEQ ID NO: 5270 - RNA, 19 nt, Artificial Sequence
  source: /note="Description of Artificial Sequence: Synthetic oligonucleotide"
  source: /note="Antisense strand to SEQ ID NO: 5269"
uugcacauggagaugucac

SEQ ID NO: 5271 - RNA, 19 nt, Artificial Sequence
  source: /note="Description of Artificial Sequence: Synthetic oligonucleotide"
  source: /note="Sense strand starting at position 2055 of SEQ ID NO: 2259"
gaaauuaacugcucggcca

SEQ ID NO: 5272 - RNA, 19 nt, Artificial Sequence
  source: /note="Description of Artificial Sequence: Synthetic oligonucleotide"
  source: /note="Antisense strand to SEQ ID NO: 5271"
uggccgagcaguuaauuuc

SEQ ID NO: 5273 - RNA, 19 nt, Artificial Sequence
  source: /note="Description of Artificial Sequence: Synthetic oligonucleotide"
  source: /note="Sense strand starting at position 2055 of SEQ ID NO: 2547"
agguuaagcugugaaauac

SEQ ID NO: 5274 - RNA, 19 nt, Artificial Sequence
  source: /note="Description of Artificial Sequence: Synthetic oligonucleotide"
  source: /note="Antisense strand to SEQ ID NO: 5273"
guauuucacagcuuaaccu

SEQ ID NO: 5275 - RNA, 19 nt, Artificial Sequence
  source: /note="Description of Artificial Sequence: Synthetic oligonucleotide"
  source: /note="Sense strand starting at position 2055 of SEQ ID NO: 2608"
agcagaacaucucaguagu

SEQ ID NO: 5276 - RNA, 19 nt, Artificial Sequence
  source: /note="Description of Artificial Sequence: Synthetic oligonucleotide"
  source: /note="Antisense strand to SEQ ID NO: 5275"
acuacugagauguucugcu

SEQ ID NO: 5277 - RNA, 19 nt, Artificial Sequence
  source: /note="Description of Artificial Sequence: Synthetic oligonucleotide"
  source: /note="Sense strand starting at position 2055 of SEQ ID NO: 2618"
cucaguaguuucuggagau

SEQ ID NO: 5278 - RNA, 19 nt, Artificial Sequence
  source: /note="Description of Artificial Sequence: Synthetic oligonucleotide"
  source: /note="Antisense strand to SEQ ID NO: 5277"
aucuccagaaacuacugag

SEQ ID NO: 5279 - RNA, 19 nt, Artificial Sequence
  source: /note="Description of Artificial Sequence: Synthetic oligonucleotide"
  source: /note="Sense strand starting at position 2055 of SEQ ID NO: 2619"
ucaguaguuucuggagauu

SEQ ID NO: 5280 - RNA, 19 nt, Artificial Sequence
  source: /note="Description of Artificial Sequence: Synthetic oligonucleotide"
  source: /note="Antisense strand to SEQ ID NO: 5279"
aaucuccagaaacuacuga

SEQ ID NO: 5281 - RNA, 19 nt, Artificial Sequence
  source: /note="Description of Artificial Sequence: Synthetic oligonucleotide"
  source: /note="Sense strand starting at position 2055 of SEQ ID NO: 2984"
agugaaucguccucagcaa

SEQ ID NO: 5282 - RNA, 19 nt, Artificial Sequence
  source: /note="Description of Artificial Sequence: Synthetic oligonucleotide"
  source: /note="Antisense strand to SEQ ID NO: 5281"
uugcugaggacgauucacu

SEQ ID NO: 5283 - RNA, 19 nt, Artificial Sequence
  source: /note="Description of Artificial Sequence: Synthetic oligonucleotide"
  source: /note="Sense strand starting at position 2055 of SEQ ID NO: 2997"
cagcaagaguguuguuugu

SEQ ID NO: 5284 - RNA, 19 nt, Artificial Sequence
  source: /note="Description of Artificial Sequence: Synthetic oligonucleotide"
  source: /note="Antisense strand to SEQ ID NO: 5283"
acaaacaacacucuugcug

SEQ ID NO: 5285 - RNA, 19 nt, Artificial Sequence
  source: /note="Description of Artificial Sequence: Synthetic oligonucleotide"
  source: /note="Sense strand starting at position 2055 of SEQ ID NO: 2999"
gcaagaguguuguuuguuu

SEQ ID NO: 5286 - RNA, 19 nt, Artificial Sequence
  source: /note="Description of Artificial Sequence: Synthetic oligonucleotide"
  source: /note="Antisense strand to SEQ ID NO: 5285"
aaacaaacaacacucuugc

SEQ ID NO: 5287 - RNA, 19 nt, Artificial Sequence
  source: /note="Description of Artificial Sequence: Synthetic oligonucleotide"
  source: /note="Sense strand starting at position 2055 of SEQ ID NO: 3140"
cggaaauguggcuguggau

SEQ ID NO: 5288 - RNA, 19 nt, Artificial Sequence
  source: /note="Description of Artificial Sequence: Synthetic oligonucleotide"
  source: /note="Antisense strand to SEQ ID NO: 5287"
auccacagccacauuuccg

SEQ ID NO: 5289 - RNA, 19 nt, Artificial Sequence
  source: /note="Description of Artificial Sequence: Synthetic oligonucleotide"
  source: /note="Sense strand starting at position 2055 of SEQ ID NO: 3177"
ccaaguggucugcgcaguu

SEQ ID NO: 5290 - RNA, 19 nt, Artificial Sequence
  source: /note="Description of Artificial Sequence: Synthetic oligonucleotide"
  source: /note="Antisense strand to SEQ ID NO: 5289"
aacugcgcagaccacuugg

SEQ ID NO: 5291 - RNA, 19 nt, Artificial Sequence
  source: /note="Description of Artificial Sequence: Synthetic oligonucleotide"
  source: /note="Sense strand starting at position 2055 of SEQ ID NO: 3265"
cuccgagugcucgacucuu

SEQ ID NO: 5292 - RNA, 19 nt, Artificial Sequence
  source: /note="Description of Artificial Sequence: Synthetic oligonucleotide"
  source: /note="Antisense strand to SEQ ID NO: 5291"
aagagucgagcacucggag

SEQ ID NO: 5293 - RNA, 19 nt, Artificial Sequence
  source: /note="Description of Artificial Sequence: Synthetic oligonucleotide"
  source: /note="Sense strand starting at position 2055 of SEQ ID NO: 3585"
cucuguaaguccuggucuu

SEQ ID NO: 5294 - RNA, 19 nt, Artificial Sequence
  source: /note="Description of Artificial Sequence: Synthetic oligonucleotide"
  source: /note="Antisense strand to SEQ ID NO: 5293"
aagaccaggacuuacagag

SEQ ID NO: 5295 - RNA, 19 nt, Artificial Sequence
  source: /note="Description of Artificial Sequence: Synthetic oligonucleotide"
  source: /note="Sense strand starting at position 2055 of SEQ ID NO: 3586"
ucuguaaguccuggucuuu

SEQ ID NO: 5296 - RNA, 19 nt, Artificial Sequence
  source: /note="Description of Artificial Sequence: Synthetic oligonucleotide"
  source: /note="Antisense strand to SEQ ID NO: 5295"
aaagaccaggacuuacaga

SEQ ID NO: 5297 - RNA, 19 nt, Artificial Sequence
  source: /note="Description of Artificial Sequence: Synthetic oligonucleotide"
  source: /note="Sense strand starting at position 2055 of SEQ ID NO: 3661"
gugugucguuuguaaggcu

SEQ ID NO: 5298 - RNA, 19 nt, Artificial Sequence
  source: /note="Description of Artificial Sequence: Synthetic oligonucleotide"
  source: /note="Antisense strand to SEQ ID NO: 5297"
agccuuacaaacgacacac

SEQ ID NO: 5299 - RNA, 19 nt, Artificial Sequence
  source: /note="Description of Artificial Sequence: Synthetic oligonucleotide"
  source: /note="Sense strand starting at position 2055 of SEQ ID NO: 3690"
cgcgguguuuagauguguu

SEQ ID NO: 5300 - RNA, 19 nt, Artificial Sequence
  source: /note="Description of Artificial Sequence: Synthetic oligonucleotide"
  source: /note="Antisense strand to SEQ ID NO: 5299"
aacacaucuaaacaccgcg

SEQ ID NO: 5301 - RNA, 19 nt, Artificial Sequence
  source: /note="Description of Artificial Sequence: Synthetic oligonucleotide"
  source: /note="Sense strand starting at position 2055 of SEQ ID NO: 3741"
uguguugccuuagggaauu

SEQ ID NO: 5302 - RNA, 19 nt, Artificial Sequence
  source: /note="Description of Artificial Sequence: Synthetic oligonucleotide"
  source: /note="Antisense strand to SEQ ID NO: 5301"
aauucccuaaggcaacaca

SEQ ID NO: 5303 - RNA, 19 nt, Artificial Sequence
  source: /note="Description of Artificial Sequence: Synthetic oligonucleotide"
  source: /note="Sense strand starting at position 2055 of SEQ ID NO: 3751"
uagggaauuucguguugug

SEQ ID NO: 5304 - RNA, 19 nt, Artificial Sequence
  source: /note="Description of Artificial Sequence: Synthetic oligonucleotide"
  source: /note="Antisense strand to SEQ ID NO: 5303"
cacaacacgaaauucccua

SEQ ID NO: 5305 - RNA, 19 nt, Artificial Sequence
  source: /note="Description of Artificial Sequence: Synthetic oligonucleotide"
  source: /note="Sense strand starting at position 2055 of SEQ ID NO: 3754"
ggaauuucguguugugugu

SEQ ID NO: 5306 - RNA, 19 nt, Artificial Sequence
  source: /note="Description of Artificial Sequence: Synthetic oligonucleotide"
  source: /note="Antisense strand to SEQ ID NO: 5305"
acacacaacacgaaauucc

SEQ ID NO: 5307 - RNA, 19 nt, Artificial Sequence
  source: /note="Description of Artificial Sequence: Synthetic oligonucleotide"
  source: /note="Sense strand starting at position 2055 of SEQ ID NO: 3775"
uuuguuuccuucgauuuga

SEQ ID NO: 5308 - RNA, 19 nt, Artificial Sequence
  source: /note="Description of Artificial Sequence: Synthetic oligonucleotide"
  source: /note="Antisense strand to SEQ ID NO: 5307"
ucaaaucgaaggaaacaaa

SEQ ID NO: 5309 - RNA, 19 nt, Artificial Sequence
  source: /note="Description of Artificial Sequence: Synthetic oligonucleotide"
  source: /note="Sense strand starting at position 2055 of SEQ ID NO: 3871"
gugagaugcgcuggugaga

SEQ ID NO: 5310 - RNA, 19 nt, Artificial Sequence
  source: /note="Description of Artificial Sequence: Synthetic oligonucleotide"
  source: /note="Antisense strand to SEQ ID NO: 5309"
ucucaccagcgcaucucac

SEQ ID NO: 5311 - RNA, 19 nt, Artificial Sequence
  source: /note="Description of Artificial Sequence: Synthetic oligonucleotide"
  source: /note="Sense strand starting at position 2055 of SEQ ID NO: 3884"
gugagaguuugcgugugua

SEQ ID NO: 5312 - RNA, 19 nt, Artificial Sequence
  source: /note="Description of Artificial Sequence: Synthetic oligonucleotide"
  source: /note="Antisense strand to SEQ ID NO: 5311"
uacacacgcaaacucucac

SEQ ID NO: 5313 - RNA, 19 nt, Artificial Sequence
  source: /note="Description of Artificial Sequence: Synthetic oligonucleotide"
  source: /note="Sense strand starting at position 2055 of SEQ ID NO: 3887"
agaguuugcguguguauuu

SEQ ID NO: 5314 - RNA, 19 nt, Artificial Sequence
  source: /note="Description of Artificial Sequence: Synthetic oligonucleotide"
  source: /note="Antisense strand to SEQ ID NO: 5313"
aaauacacacgcaaacucu

SEQ ID NO: 5315 - RNA, 19 nt, Artificial Sequence
  source: /note="Description of Artificial Sequence: Synthetic oligonucleotide"
  source: /note="Sense strand starting at position 2056 of SEQ ID NO: 350"
gacgcucuuuccuccgaaa

SEQ ID NO: 5316 - RNA, 19 nt, Artificial Sequence
  source: /note="Description of Artificial Sequence: Synthetic oligonucleotide"
  source: /note="Antisense strand to SEQ ID NO: 5315"
uuucggaggaaagagcguc

SEQ ID NO: 5317 - RNA, 19 nt, Artificial Sequence
  source: /note="Description of Artificial Sequence: Synthetic oligonucleotide"
  source: /note="Sense strand starting at position 2056 of SEQ ID NO: 352"
cgcucuuuccuccgaaacu

SEQ ID NO: 5318 - RNA, 19 nt, Artificial Sequence
  source: /note="Description of Artificial Sequence: Synthetic oligonucleotide"
  source: /note="Antisense strand to SEQ ID NO: 5317"
aguuucggaggaaagagcg

SEQ ID NO: 5319 - RNA, 19 nt, Artificial Sequence
  source: /note="Description of Artificial Sequence: Synthetic oligonucleotide"
  source: /note="Sense strand starting at position 2056 of SEQ ID NO: 353"
gcucuuuccuccgaaacug

SEQ ID NO: 5320 - RNA, 19 nt, Artificial Sequence
  source: /note="Description of Artificial Sequence: Synthetic oligonucleotide"
  source: /note="Antisense strand to SEQ ID NO: 5319"
caguuucggaggaaagagc

SEQ ID NO: 5321 - RNA, 19 nt, Artificial Sequence
  source: /note="Description of Artificial Sequence: Synthetic oligonucleotide"
  source: /note="Sense strand starting at position 2056 of SEQ ID NO: 364"
cgaaacuguagcugucaau

SEQ ID NO: 5322 - RNA, 19 nt, Artificial Sequence
  source: /note="Description of Artificial Sequence: Synthetic oligonucleotide"
  source: /note="Antisense strand to SEQ ID NO: 5321"
auugacagcuacaguuucg

SEQ ID NO: 5323 - RNA, 19 nt, Artificial Sequence
  source: /note="Description of Artificial Sequence: Synthetic oligonucleotide"
  source: /note="Sense strand starting at position 2056 of SEQ ID NO: 371"
guagcugucaaucggaagu

SEQ ID NO: 5324 - RNA, 19 nt, Artificial Sequence
  source: /note="Description of Artificial Sequence: Synthetic oligonucleotide"
  source: /note="Antisense strand to SEQ ID NO: 5323"
acuuccgauugacagcuac

SEQ ID NO: 5325 - RNA, 19 nt, Artificial Sequence
  source: /note="Description of Artificial Sequence: Synthetic oligonucleotide"
  source: /note="Sense strand starting at position 2056 of SEQ ID NO: 373"
agcugucaaucggaaguga

SEQ ID NO: 5326 - RNA, 19 nt, Artificial Sequence
  source: /note="Description of Artificial Sequence: Synthetic oligonucleotide"
  source: /note="Antisense strand to SEQ ID NO: 5325"
ucacuuccgauugacagcu

SEQ ID NO: 5327 - RNA, 19 nt, Artificial Sequence
  source: /note="Description of Artificial Sequence: Synthetic oligonucleotide"
  source: /note="Sense strand starting at position 2056 of SEQ ID NO: 585"
aaugcauugugucaaguga

SEQ ID NO: 5328 - RNA, 19 nt, Artificial Sequence
  source: /note="Description of Artificial Sequence: Synthetic oligonucleotide"
  source: /note="Antisense strand to SEQ ID NO: 5327"
ucacuugacacaaugcauu

SEQ ID NO: 5329 - RNA, 19 nt, Artificial Sequence
  source: /note="Description of Artificial Sequence: Synthetic oligonucleotide"
  source: /note="Sense strand starting at position 2056 of SEQ ID NO: 592"
ugugucaagugauaaagaa

SEQ ID NO: 5330 - RNA, 19 nt, Artificial Sequence
  source: /note="Description of Artificial Sequence: Synthetic oligonucleotide"
  source: /note="Antisense strand to SEQ ID NO: 5329"
uucuuuaucacuugacaca

SEQ ID NO: 5331 - RNA, 19 nt, Artificial Sequence
  source: /note="Description of Artificial Sequence: Synthetic oligonucleotide"
  source: /note="Sense strand starting at position 2056 of SEQ ID NO: 621"
cgaaucaccuaacgucaua

SEQ ID NO: 5332 - RNA, 19 nt, Artificial Sequence
  source: /note="Description of Artificial Sequence: Synthetic oligonucleotide"
  source: /note="Antisense strand to SEQ ID NO: 5331"
uaugacguuaggugauucg

SEQ ID NO: 5333 - RNA, 19 nt, Artificial Sequence
  source: /note="Description of Artificial Sequence: Synthetic oligonucleotide"
  source: /note="Sense strand starting at position 2056 of SEQ ID NO: 727"
uuggaugcuuaacauaaga

SEQ ID NO: 5334 - RNA, 19 nt, Artificial Sequence
  source: /note="Description of Artificial Sequence: Synthetic oligonucleotide"
  source: /note="Antisense strand to SEQ ID NO: 5333"
ucuuauguuaagcauccaa

SEQ ID NO: 5335 - RNA, 19 nt, Artificial Sequence
  source: /note="Description of Artificial Sequence: Synthetic oligonucleotide"
  source: /note="Sense strand starting at position 2056 of SEQ ID NO: 940"
uguuguuuauaacaugaca

SEQ ID NO: 5336 - RNA, 19 nt, Artificial Sequence
  source: /note="Description of Artificial Sequence: Synthetic oligonucleotide"
  source: /note="Antisense strand to SEQ ID NO: 5335"
ugucauguuauaaacaaca

SEQ ID NO: 5337 - RNA, 19 nt, Artificial Sequence
  source: /note="Description of Artificial Sequence: Synthetic oligonucleotide"
  source: /note="Sense strand starting at position 2056 of SEQ ID NO: 1098"
aaucgaaucuguggagaga

SEQ ID NO: 5338 - RNA, 19 nt, Artificial Sequence
  source: /note="Description of Artificial Sequence: Synthetic oligonucleotide"
  source: /note="Antisense strand to SEQ ID NO: 5337"
ucucuccacagauucgauu

SEQ ID NO: 5339 - RNA, 19 nt, Artificial Sequence
  source: /note="Description of Artificial Sequence: Synthetic oligonucleotide"
  source: /note="Sense strand starting at position 2056 of SEQ ID NO: 1529"
aguugcauauguuaugaua

SEQ ID NO: 5340 - RNA, 19 nt, Artificial Sequence
  source: /note="Description of Artificial Sequence: Synthetic oligonucleotide"
  source: /note="Antisense strand to SEQ ID NO: 5339"
uaucauaacauaugcaacu

SEQ ID NO: 5341 - RNA, 19 nt, Artificial Sequence
  source: /note="Description of Artificial Sequence: Synthetic oligonucleotide"
  source: /note="Sense strand starting at position 2056 of SEQ ID NO: 1630"
gugcuaauuuggcaugugu

SEQ ID NO: 5342 - RNA, 19 nt, Artificial Sequence
  source: /note="Description of Artificial Sequence: Synthetic oligonucleotide"
  source: /note="Antisense strand to SEQ ID NO: 5341"
acacaugccaaauuagcac

SEQ ID NO: 5343 - RNA, 19 nt, Artificial Sequence
  source: /note="Description of Artificial Sequence: Synthetic oligonucleotide"
  source: /note="Sense strand starting at position 2056 of SEQ ID NO: 1643"
auguguuggugcuacaaca

SEQ ID NO: 5344 - RNA, 19 nt, Artificial Sequence
  source: /note="Description of Artificial Sequence: Synthetic oligonucleotide"
  source: /note="Antisense strand to SEQ ID NO: 5343"
uguuguagcaccaacacau

SEQ ID NO: 5345 - RNA, 19 nt, Artificial Sequence
  source: /note="Description of Artificial Sequence: Synthetic oligonucleotide"
  source: /note="Sense strand starting at position 2056 of SEQ ID NO: 1917"
aagagauucucuggugaag

SEQ ID NO: 5346 - RNA, 19 nt, Artificial Sequence
  source: /note="Description of Artificial Sequence: Synthetic oligonucleotide"
  source: /note="Antisense strand to SEQ ID NO: 5345"
cuucaccagagaaucucuu

SEQ ID NO: 5347 - RNA, 19 nt, Artificial Sequence
  source: /note="Description of Artificial Sequence: Synthetic oligonucleotide"
  source: /note="Sense strand starting at position 2056 of SEQ ID NO: 1919"
gagauucucuggugaagaa

SEQ ID NO: 5348 - RNA, 19 nt, Artificial Sequence
  source: /note="Description of Artificial Sequence: Synthetic oligonucleotide"
  source: /note="Antisense strand to SEQ ID NO: 5347"
uucuucaccagagaaucuc

SEQ ID NO: 5349 - RNA, 19 nt, Artificial Sequence
  source: /note="Description of Artificial Sequence: Synthetic oligonucleotide"
  source: /note="Sense strand starting at position 2056 of SEQ ID NO: 1945"
cugucagguccugguggua

SEQ ID NO: 5350 - RNA, 19 nt, Artificial Sequence
  source: /note="Description of Artificial Sequence: Synthetic oligonucleotide"
  source: /note="Antisense strand to SEQ ID NO: 5349"
uaccaccaggaccugacag

SEQ ID NO: 5351 - RNA, 19 nt, Artificial Sequence
  source: /note="Description of Artificial Sequence: Synthetic oligonucleotide"
  source: /note="Sense strand starting at position 2056 of SEQ ID NO: 2181"
aaugguuucuguguugagu

SEQ ID NO: 5352 - RNA, 19 nt, Artificial Sequence
  source: /note="Description of Artificial Sequence: Synthetic oligonucleotide"
  source: /note="Antisense strand to SEQ ID NO: 5351"
acucaacacagaaaccauu

SEQ ID NO: 5353 - RNA, 19 nt, Artificial Sequence
  source: /note="Description of Artificial Sequence: Synthetic oligonucleotide"
  source: /note="Sense strand starting at position 2056 of SEQ ID NO: 2183"
ugguuucuguguugaguuu

SEQ ID NO: 5354 - RNA, 19 nt, Artificial Sequence
  source: /note="Description of Artificial Sequence: Synthetic oligonucleotide"
  source: /note="Antisense strand to SEQ ID NO: 5353"
aaacucaacacagaaacca

SEQ ID NO: 5355 - RNA, 19 nt, Artificial Sequence
  source: /note="Description of Artificial Sequence: Synthetic oligonucleotide"
  source: /note="Sense strand starting at position 2056 of SEQ ID NO: 2192"
uguugaguuuaguuaagca

SEQ ID NO: 5356 - RNA, 19 nt, Artificial Sequence
  source: /note="Description of Artificial Sequence: Synthetic oligonucleotide"
  source: /note="Antisense strand to SEQ ID NO: 5355"
ugcuuaacuaaacucaaca

SEQ ID NO: 5357 - RNA, 19 nt, Artificial Sequence
  source: /note="Description of Artificial Sequence: Synthetic oligonucleotide"
  source: /note="Sense strand starting at position 2056 of SEQ ID NO: 2231"
gugcuuuacugauacagga

SEQ ID NO: 5358 - RNA, 19 nt, Artificial Sequence
  source: /note="Description of Artificial Sequence: Synthetic oligonucleotide"
  source: /note="Antisense strand to SEQ ID NO: 5357"
uccuguaucaguaaagcac

SEQ ID NO: 5359 - RNA, 19 nt, Artificial Sequence
  source: /note="Description of Artificial Sequence: Synthetic oligonucleotide"
  source: /note="Sense strand starting at position 2056 of SEQ ID NO: 2245"
caggaacugugccaugagu

SEQ ID NO: 5360 - RNA, 19 nt, Artificial Sequence
  source: /note="Description of Artificial Sequence: Synthetic oligonucleotide"
  source: /note="Antisense strand to SEQ ID NO: 5359"
acucauggcacaguuccug

SEQ ID NO: 5361 - RNA, 19 nt, Artificial Sequence
  source: /note="Description of Artificial Sequence: Synthetic oligonucleotide"
  source: /note="Sense strand starting at position 2056 of SEQ ID NO: 2418"
ggaauugucucugagagga

SEQ ID NO: 5362 - RNA, 19 nt, Artificial Sequence
  source: /note="Description of Artificial Sequence: Synthetic oligonucleotide"
  source: /note="Antisense strand to SEQ ID NO: 5361"
uccucucagagacaauucc

SEQ ID NO: 5363 - RNA, 19 nt, Artificial Sequence
  source: /note="Description of Artificial Sequence: Synthetic oligonucleotide"
  source: /note="Sense strand starting at position 2056 of SEQ ID NO: 2420"
aauugucucugagaggaca

SEQ ID NO: 5364 - RNA, 19 nt, Artificial Sequence
  source: /note="Description of Artificial Sequence: Synthetic oligonucleotide"
  source: /note="Antisense strand to SEQ ID NO: 5363"
uguccucucagagacaauu

SEQ ID NO: 5365 - RNA, 19 nt, Artificial Sequence
  source: /note="Description of Artificial Sequence: Synthetic oligonucleotide"
  source: /note="Sense strand starting at position 2056 of SEQ ID NO: 2449"
cccucuaggucugacaagu

SEQ ID NO: 5366 - RNA, 19 nt, Artificial Sequence
  source: /note="Description of Artificial Sequence: Synthetic oligonucleotide"
  source: /note="Antisense strand to SEQ ID NO: 5365"
acuugucagaccuagaggg

SEQ ID NO: 5367 - RNA, 19 nt, Artificial Sequence
  source: /note="Description of Artificial Sequence: Synthetic oligonucleotide"
  source: /note="Sense strand starting at position 2056 of SEQ ID NO: 2462"
acaagugauuccuggccaa

SEQ ID NO: 5368 - RNA, 19 nt, Artificial Sequence
  source: /note="Description of Artificial Sequence: Synthetic oligonucleotide"
  source: /note="Antisense strand to SEQ ID NO: 5367"
uuggccaggaaucacuugu

SEQ ID NO: 5369 - RNA, 19 nt, Artificial Sequence
  source: /note="Description of Artificial Sequence: Synthetic oligonucleotide"
  source: /note="Sense strand starting at position 2056 of SEQ ID NO: 2477"
ccaagauagucaggauagu

SEQ ID NO: 5370 - RNA, 19 nt, Artificial Sequence
  source: /note="Description of Artificial Sequence: Synthetic oligonucleotide"
  source: /note="Antisense strand to SEQ ID NO: 5369"
acuauccugacuaucuugg

SEQ ID NO: 5371 - RNA, 19 nt, Artificial Sequence
  source: /note="Description of Artificial Sequence: Synthetic oligonucleotide"
  source: /note="Sense strand starting at position 2056 of SEQ ID NO: 2528"
aguuauugcugucuugacu

SEQ ID NO: 5372 - RNA, 19 nt, Artificial Sequence
  source: /note="Description of Artificial Sequence: Synthetic oligonucleotide"
  source: /note="Antisense strand to SEQ ID NO: 5371"
agucaagacagcaauaacu

SEQ ID NO: 5373 - RNA, 19 nt, Artificial Sequence
  source: /note="Description of Artificial Sequence: Synthetic oligonucleotide"
  source: /note="Sense strand starting at position 2056 of SEQ ID NO: 2580"
ggaacuauguccugcucac

SEQ ID NO: 5374 - RNA, 19 nt, Artificial Sequence
  source: /note="Description of Artificial Sequence: Synthetic oligonucleotide"
  source: /note="Antisense strand to SEQ ID NO: 5373"
gugagcaggacauaguucc

SEQ ID NO: 5375 - RNA, 19 nt, Artificial Sequence
  source: /note="Description of Artificial Sequence: Synthetic oligonucleotide"
  source: /note="Sense strand starting at position 2056 of SEQ ID NO: 2663"
aaaugucauuuaugugagu

SEQ ID NO: 5376 - RNA, 19 nt, Artificial Sequence
  source: /note="Description of Artificial Sequence: Synthetic oligonucleotide"
  source: /note="Antisense strand to SEQ ID NO: 5375"
acucacauaaaugacauuu

SEQ ID NO: 5377 - RNA, 19 nt, Artificial Sequence
  source: /note="Description of Artificial Sequence: Synthetic oligonucleotide"
  source: /note="Sense strand starting at position 2056 of SEQ ID NO: 2666"
ugucauuuaugugaguaag

SEQ ID NO: 5378 - RNA, 19 nt, Artificial Sequence
  source: /note="Description of Artificial Sequence: Synthetic oligonucleotide"
  source: /note="Antisense strand to SEQ ID NO: 5377"
cuuacucacauaaaugaca

SEQ ID NO: 5379 - RNA, 19 nt, Artificial Sequence
  source: /note="Description of Artificial Sequence: Synthetic oligonucleotide"
  source: /note="Sense strand starting at position 2056 of SEQ ID NO: 2860"
ugaaauucuugcugauucu

SEQ ID NO: 5380 - RNA, 19 nt, Artificial Sequence
  source: /note="Description of Artificial Sequence: Synthetic oligonucleotide"
  source: /note="Antisense strand to SEQ ID NO: 5379"
agaaucagcaagaauuuca

SEQ ID NO: 5381 - RNA, 19 nt, Artificial Sequence
  source: /note="Description of Artificial Sequence: Synthetic oligonucleotide"
  source: /note="Sense strand starting at position 2056 of SEQ ID NO: 2874"
auucuauaguccuauagug

SEQ ID NO: 5382 - RNA, 19 nt, Artificial Sequence
  source: /note="Description of Artificial Sequence: Synthetic oligonucleotide"
  source: /note="Antisense strand to SEQ ID NO: 5381"
cacuauaggacuauagaau

SEQ ID NO: 5383 - RNA, 19 nt, Artificial Sequence
  source: /note="Description of Artificial Sequence: Synthetic oligonucleotide"
  source: /note="Sense strand starting at position 2056 of SEQ ID NO: 2882"
guccuauagugcuaaccau

SEQ ID NO: 5384 - RNA, 19 nt, Artificial Sequence
  source: /note="Description of Artificial Sequence: Synthetic oligonucleotide"
  source: /note="Antisense strand to SEQ ID NO: 5383"
augguuagcacuauaggac

SEQ ID NO: 5385 - RNA, 19 nt, Artificial Sequence
  source: /note="Description of Artificial Sequence: Synthetic oligonucleotide"
  source: /note="Sense strand starting at position 2056 of SEQ ID NO: 3129"
aauuauagcuuugguguau

SEQ ID NO: 5386 - RNA, 19 nt, Artificial Sequence
  source: /note="Description of Artificial Sequence: Synthetic oligonucleotide"
  source: /note="Antisense strand to SEQ ID NO: 5385"
auacaccaaagcuauaauu

SEQ ID NO: 5387 - RNA, 19 nt, Artificial Sequence
  source: /note="Description of Artificial Sequence: Synthetic oligonucleotide"
  source: /note="Sense strand starting at position 2056 of SEQ ID NO: 3210"
caaggagguucucauuguu

SEQ ID NO: 5388 - RNA, 19 nt, Artificial Sequence
  source: /note="Description of Artificial Sequence: Synthetic oligonucleotide"
  source: /note="Antisense strand to SEQ ID NO: 5387"
aacaaugagaaccuccuug

SEQ ID NO: 5389 - RNA, 19 nt, Artificial Sequence
  source: /note="Description of Artificial Sequence: Synthetic oligonucleotide"
  source: /note="Sense strand starting at position 2056 of SEQ ID NO: 3218"
uucucauuguugugagguu

SEQ ID NO: 5390 - RNA, 19 nt, Artificial Sequence
  source: /note="Description of Artificial Sequence: Synthetic oligonucleotide"
  source: /note="Antisense strand to SEQ ID NO: 5389"
aaccucacaacaaugagaa

SEQ ID NO: 5391 - RNA, 19 nt, Artificial Sequence
  source: /note="Description of Artificial Sequence: Synthetic oligonucleotide"
  source: /note="Sense strand starting at position 2056 of SEQ ID NO: 3219"
ucucauuguugugagguuu

SEQ ID NO: 5392 - RNA, 19 nt, Artificial Sequence
  source: /note="Description of Artificial Sequence: Synthetic oligonucleotide"
  source: /note="Antisense strand to SEQ ID NO: 5391"
aaaccucacaacaaugaga

SEQ ID NO: 5393 - RNA, 19 nt, Artificial Sequence
  source: /note="Description of Artificial Sequence: Synthetic oligonucleotide"
  source: /note="Sense strand starting at position 2056 of SEQ ID NO: 3227"
uugugagguuuauaaccau

SEQ ID NO: 5394 - RNA, 19 nt, Artificial Sequence
  source: /note="Description of Artificial Sequence: Synthetic oligonucleotide"
  source: /note="Antisense strand to SEQ ID NO: 5393"
augguuauaaaccucacaa

SEQ ID NO: 5395 - RNA, 19 nt, Artificial Sequence
  source: /note="Description of Artificial Sequence: Synthetic oligonucleotide"
  source: /note="Sense strand starting at position 2056 of SEQ ID NO: 3284"
aguuuaaauuuguacccuu

SEQ ID NO: 5396 - RNA, 19 nt, Artificial Sequence
  source: /note="Description of Artificial Sequence: Synthetic oligonucleotide"
  source: /note="Antisense strand to SEQ ID NO: 5395"
aaggguacaaauuuaaacu

SEQ ID NO: 5397 - RNA, 19 nt, Artificial Sequence
  source: /note="Description of Artificial Sequence: Synthetic oligonucleotide"
  source: /note="Sense strand starting at position 2056 of SEQ ID NO: 3298"
cccuuagucuacuaaguga

SEQ ID NO: 5398 - RNA, 19 nt, Artificial Sequence
  source: /note="Description of Artificial Sequence: Synthetic oligonucleotide"
  source: /note="Antisense strand to SEQ ID NO: 5397"
ucacuuaguagacuaaggg

SEQ ID NO: 5399 - RNA, 19 nt, Artificial Sequence
  source: /note="Description of Artificial Sequence: Synthetic oligonucleotide"
  source: /note="Sense strand starting at position 2056 of SEQ ID NO: 3363"
gcaagaauagguugucugu

SEQ ID NO: 5400 - RNA, 19 nt, Artificial Sequence
  source: /note="Description of Artificial Sequence: Synthetic oligonucleotide"
  source: /note="Antisense strand to SEQ ID NO: 5399"
acagacaaccuauucuugc

SEQ ID NO: 5401 - RNA, 19 nt, Artificial Sequence
  source: /note="Description of Artificial Sequence: Synthetic oligonucleotide"
  source: /note="Sense strand starting at position 2056 of SEQ ID NO: 3714"
auagguauaugcuagaaca

SEQ ID NO: 5402 - RNA, 19 nt, Artificial Sequence
  source: /note="Description of Artificial Sequence: Synthetic oligonucleotide"
  source: /note="Antisense strand to SEQ ID NO: 5401"
uguucuagcauauaccuau

SEQ ID NO: 5403 - RNA, 19 nt, Artificial Sequence
  source: /note="Description of Artificial Sequence: Synthetic oligonucleotide"
  source: /note="Sense strand starting at position 2056 of SEQ ID NO: 3858"
agauuugacucguaccuau

SEQ ID NO: 5404 - RNA, 19 nt, Artificial Sequence
  source: /note="Description of Artificial Sequence: Synthetic oligonucleotide"
  source: /note="Antisense strand to SEQ ID NO: 5403"
auagguacgagucaaaucu

SEQ ID NO: 5405 - RNA, 19 nt, Artificial Sequence
  source: /note="Description of Artificial Sequence: Synthetic oligonucleotide"
  source: /note="Sense strand starting at position 2056 of SEQ ID NO: 3887"
auggguuuccauugcaugu

SEQ ID NO: 5406 - RNA, 19 nt, Artificial Sequence
  source: /note="Description of Artificial Sequence: Synthetic oligonucleotide"
  source: /note="Antisense strand to SEQ ID NO: 5405"
acaugcaauggaaacccau

SEQ ID NO: 5407 - RNA, 19 nt, Artificial Sequence
  source: /note="Description of Artificial Sequence: Synthetic oligonucleotide"
  source: /note="Sense strand starting at position 2056 of SEQ ID NO: 3889"
ggguuuccauugcauguua

SEQ ID NO: 5408 - RNA, 19 nt, Artificial Sequence
  source: /note="Description of Artificial Sequence: Synthetic oligonucleotide"
  source: /note="Antisense strand to SEQ ID NO: 5407"
uaacaugcaauggaaaccc

SEQ ID NO: 5409 - RNA, 19 nt, Artificial Sequence
  source: /note="Description of Artificial Sequence: Synthetic oligonucleotide"
  source: /note="Sense strand starting at position 2056 of SEQ ID NO: 3931"
uucccugaaugugaguauu

SEQ ID NO: 5410 - RNA, 19 nt, Artificial Sequence
  source: /note="Description of Artificial Sequence: Synthetic oligonucleotide"
  source: /note="Antisense strand to SEQ ID NO: 5409"
aauacucacauucagggaa

SEQ ID NO: 5411 - RNA, 19 nt, Artificial Sequence
  source: /note="Description of Artificial Sequence: Synthetic oligonucleotide"
  source: /note="Sense strand starting at position 2056 of SEQ ID NO: 3978"
ugaauaaaguugcaaguaa

SEQ ID NO: 5412 - RNA, 19 nt, Artificial Sequence
  source: /note="Description of Artificial Sequence: Synthetic oligonucleotide"
  source: /note="Antisense strand to SEQ ID NO: 5411"
uuacuugcaacuuuauuca

SEQ ID NO: 5413 - RNA, 19 nt, Artificial Sequence
  source: /note="Description of Artificial Sequence: Synthetic oligonucleotide"
  source: /note="Sense strand starting at position 2057 of SEQ ID NO: 368"
uuugaacacugacauuguu

SEQ ID NO: 5414 - RNA, 19 nt, Artificial Sequence
  source: /note="Description of Artificial Sequence: Synthetic oligonucleotide"
  source: /note="Antisense strand to SEQ ID NO: 5413"
aacaaugucaguguucaaa

SEQ ID NO: 5415 - RNA, 19 nt, Artificial Sequence
  source: /note="Description of Artificial Sequence: Synthetic oligonucleotide"
  source: /note="Sense strand starting at position 2057 of SEQ ID NO: 500"
gggcucuuaucucaagcua

SEQ ID NO: 5416 - RNA, 19 nt, Artificial Sequence
  source: /note="Description of Artificial Sequence: Synthetic oligonucleotide"
  source: /note="Antisense strand to SEQ ID NO: 5415"
uagcuugagauaagagccc

SEQ ID NO: 5417 - RNA, 19 nt, Artificial Sequence
  source: /note="Description of Artificial Sequence: Synthetic oligonucleotide"
  source: /note="Sense strand starting at position 2057 of SEQ ID NO: 680"
ugcuguuaauaugguuaau

SEQ ID NO: 5418 - RNA, 19 nt, Artificial Sequence
  source: /note="Description of Artificial Sequence: Synthetic oligonucleotide"
  source: /note="Antisense strand to SEQ ID NO: 5417"
auuaaccauauuaacagca

SEQ ID NO: 5419 - RNA, 19 nt, Artificial Sequence
  source: /note="Description of Artificial Sequence: Synthetic oligonucleotide"
  source: /note="Sense strand starting at position 2057 of SEQ ID NO: 813"
gaaaguaugugcuaaguaa

SEQ ID NO: 5420 - RNA, 19 nt, Artificial Sequence
  source: /note="Description of Artificial Sequence: Synthetic oligonucleotide"
  source: /note="Antisense strand to SEQ ID NO: 5419"
uuacuuagcacauacuuuc

SEQ ID NO: 5421 - RNA, 19 nt, Artificial Sequence
  source: /note="Description of Artificial Sequence: Synthetic oligonucleotide"
  source: /note="Sense strand starting at position 2057 of SEQ ID NO: 1066"
gaugccaucuguuguauua

SEQ ID NO: 5422 - RNA, 19 nt, Artificial Sequence
  source: /note="Description of Artificial Sequence: Synthetic oligonucleotide"
  source: /note="Antisense strand to SEQ ID NO: 5421"
uaauacaacagauggcauc

SEQ ID NO: 5423 - RNA, 19 nt, Artificial Sequence
  source: /note="Description of Artificial Sequence: Synthetic oligonucleotide"
  source: /note="Sense strand starting at position 2057 of SEQ ID NO: 1068"
ugccaucuguuguauuauc

SEQ ID NO: 5424 - RNA, 19 nt, Artificial Sequence
  source: /note="Description of Artificial Sequence: Synthetic oligonucleotide"
  source: /note="Antisense strand to SEQ ID NO: 5423"
gauaauacaacagauggca

SEQ ID NO: 5425 - RNA, 19 nt, Artificial Sequence
  source: /note="Description of Artificial Sequence: Synthetic oligonucleotide"
  source: /note="Sense strand starting at position 2057 of SEQ ID NO: 1137"
cggcaaucuuacccugcua

SEQ ID NO: 5426 - RNA, 19 nt, Artificial Sequence
  source: /note="Description of Artificial Sequence: Synthetic oligonucleotide"
  source: /note="Antisense strand to SEQ ID NO: 5425"
uagcaggguaagauugccg

SEQ ID NO: 5427 - RNA, 19 nt, Artificial Sequence
  source: /note="Description of Artificial Sequence: Synthetic oligonucleotide"
  source: /note="Sense strand starting at position 2057 of SEQ ID NO: 1200"
uuaacuaauugcugaggca

SEQ ID NO: 5428 - RNA, 19 nt, Artificial Sequence
  source: /note="Description of Artificial Sequence: Synthetic oligonucleotide"
  source: /note="Antisense strand to SEQ ID NO: 5427"
ugccucagcaauuaguuaa

SEQ ID NO: 5429 - RNA, 19 nt, Artificial Sequence
  source: /note="Description of Artificial Sequence: Synthetic oligonucleotide"
  source: /note="Sense strand starting at position 2057 of SEQ ID NO: 1250"
gcgcuauauuguuucuacu

SEQ ID NO: 5430 - RNA, 19 nt, Artificial Sequence
  source: /note="Description of Artificial Sequence: Synthetic oligonucleotide"
  source: /note="Antisense strand to SEQ ID NO: 5429"
aguagaaacaauauagcgc

SEQ ID NO: 5431 - RNA, 19 nt, Artificial Sequence
  source: /note="Description of Artificial Sequence: Synthetic oligonucleotide"
  source: /note="Sense strand starting at position 2057 of SEQ ID NO: 1252"
gcuauauuguuucuacuuu

SEQ ID NO: 5432 - RNA, 19 nt, Artificial Sequence
  source: /note="Description of Artificial Sequence: Synthetic oligonucleotide"
  source: /note="Antisense strand to SEQ ID NO: 5431"
aaaguagaaacaauauagc

SEQ ID NO: 5433 - RNA, 19 nt, Artificial Sequence
  source: /note="Description of Artificial Sequence: Synthetic oligonucleotide"
  source: /note="Sense strand starting at position 2057 of SEQ ID NO: 1459"
cugccaguuuauucuuaua

SEQ ID NO: 5434 - RNA, 19 nt, Artificial Sequence
  source: /note="Description of Artificial Sequence: Synthetic oligonucleotide"
  source: /note="Antisense strand to SEQ ID NO: 5433"
uauaagaauaaacuggcag

SEQ ID NO: 5435 - RNA, 19 nt, Artificial Sequence
  source: /note="Description of Artificial Sequence: Synthetic oligonucleotide"
  source: /note="Sense strand starting at position 2057 of SEQ ID NO: 1462"
ccaguuuauucuuauacga

SEQ ID NO: 5436 - RNA, 19 nt, Artificial Sequence
  source: /note="Description of Artificial Sequence: Synthetic oligonucleotide"
  source: /note="Antisense strand to SEQ ID NO: 5435"
ucguauaagaauaaacugg

SEQ ID NO: 5437 - RNA, 19 nt, Artificial Sequence
  source: /note="Description of Artificial Sequence: Synthetic oligonucleotide"
  source: /note="Sense strand starting at position 2057 of SEQ ID NO: 1464"
aguuuauucuuauacgauc

SEQ ID NO: 5438 - RNA, 19 nt, Artificial Sequence
  source: /note="Description of Artificial Sequence: Synthetic oligonucleotide"
  source: /note="Antisense strand to SEQ ID NO: 5437"
gaucguauaagaauaaacu

SEQ ID NO: 5439 - RNA, 19 nt, Artificial Sequence
  source: /note="Description of Artificial Sequence: Synthetic oligonucleotide"
  source: /note="Sense strand starting at position 2057 of SEQ ID NO: 1589"
guaaaucucuuugagcuaa

SEQ ID NO: 5440 - RNA, 19 nt, Artificial Sequence
  source: /note="Description of Artificial Sequence: Synthetic oligonucleotide"
  source: /note="Antisense strand to SEQ ID NO: 5439"
uuagcucaaagagauuuac

SEQ ID NO: 5441 - RNA, 19 nt, Artificial Sequence
  source: /note="Description of Artificial Sequence: Synthetic oligonucleotide"
  source: /note="Sense strand starting at position 2057 of SEQ ID NO: 1692"
ccuugaugguuacagauga

SEQ ID NO: 5442 - RNA, 19 nt, Artificial Sequence
  source: /note="Description of Artificial Sequence: Synthetic oligonucleotide"
  source: /note="Antisense strand to SEQ ID NO: 5441"
ucaucuguaaccaucaagg

SEQ ID NO: 5443 - RNA, 19 nt, Artificial Sequence
  source: /note="Description of Artificial Sequence: Synthetic oligonucleotide"
  source: /note="Sense strand starting at position 2057 of SEQ ID NO: 1858"
acaggcaucugccaagacu

SEQ ID NO: 5444 - RNA, 19 nt, Artificial Sequence
  source: /note="Description of Artificial Sequence: Synthetic oligonucleotide"
  source: /note="Antisense strand to SEQ ID NO: 5443"
agucuuggcagaugccugu

SEQ ID NO: 5445 - RNA, 19 nt, Artificial Sequence
  source: /note="Description of Artificial Sequence: Synthetic oligonucleotide"
  source: /note="Sense strand starting at position 2057 of SEQ ID NO: 1869"
ccaagacuguaguacauaa

SEQ ID NO: 5446 - RNA, 19 nt, Artificial Sequence
  source: /note="Description of Artificial Sequence: Synthetic oligonucleotide"
  source: /note="Antisense strand to SEQ ID NO: 5445"
uuauguacuacagucuugg

SEQ ID NO: 5447 - RNA, 19 nt, Artificial Sequence
  source: /note="Description of Artificial Sequence: Synthetic oligonucleotide"
  source: /note="Sense strand starting at position 2057 of SEQ ID NO: 1966"
aaguguuaaucuggaggaa

SEQ ID NO: 5448 - RNA, 19 nt, Artificial Sequence
  source: /note="Description of Artificial Sequence: Synthetic oligonucleotide"
  source: /note="Antisense strand to SEQ ID NO: 5447"
uuccuccagauuaacacuu

SEQ ID NO: 5449 - RNA, 19 nt, Artificial Sequence
  source: /note="Description of Artificial Sequence: Synthetic oligonucleotide"
  source: /note="Sense strand starting at position 2057 of SEQ ID NO: 1979"
gaggaacaguuccaugagu

SEQ ID NO: 5450 - RNA, 19 nt, Artificial Sequence
  source: /note="Description of Artificial Sequence: Synthetic oligonucleotide"
  source: /note="Antisense strand to SEQ ID NO: 5449"
acucauggaacuguuccuc

SEQ ID NO: 5451 - RNA, 19 nt, Artificial Sequence
  source: /note="Description of Artificial Sequence: Synthetic oligonucleotide"
  source: /note="Sense strand starting at position 2057 of SEQ ID NO: 2011"
cagugugucuccuacacuu

SEQ ID NO: 5452 - RNA, 19 nt, Artificial Sequence
  source: /note="Description of Artificial Sequence: Synthetic oligonucleotide"
  source: /note="Antisense strand to SEQ ID NO: 5451"
aaguguaggagacacacug

SEQ ID NO: 5453 - RNA, 19 nt, Artificial Sequence
  source: /note="Description of Artificial Sequence: Synthetic oligonucleotide"
  source: /note="Sense strand starting at position 2057 of SEQ ID NO: 2098"
gcaagaaguauuggcagca

SEQ ID NO: 5454 - RNA, 19 nt, Artificial Sequence
  source: /note="Description of Artificial Sequence: Synthetic oligonucleotide"
  source: /note="Antisense strand to SEQ ID NO: 5453"
ugcugccaauacuucuugc

SEQ ID NO: 5455 - RNA, 19 nt, Artificial Sequence
  source: /note="Description of Artificial Sequence: Synthetic oligonucleotide"
  source: /note="Sense strand starting at position 2057 of SEQ ID NO: 2215"
agaaacuggucucauucuu

SEQ ID NO: 5456 - RNA, 19 nt, Artificial Sequence
  source: /note="Description of Artificial Sequence: Synthetic oligonucleotide"
  source: /note="Antisense strand to SEQ ID NO: 5455"
aagaaugagaccaguuucu

SEQ ID NO: 5457 - RNA, 19 nt, Artificial Sequence
  source: /note="Description of Artificial Sequence: Synthetic oligonucleotide"
  source: /note="Sense strand starting at position 2057 of SEQ ID NO: 2263"
agcuaagucuuccagcaag

SEQ ID NO: 5458 - RNA, 19 nt, Artificial Sequence
  source: /note="Description of Artificial Sequence: Synthetic oligonucleotide"
  source: /note="Antisense strand to SEQ ID NO: 5457"
cuugcuggaagacuuagcu

SEQ ID NO: 5459 - RNA, 19 nt, Artificial Sequence
  source: /note="Description of Artificial Sequence: Synthetic oligonucleotide"
  source: /note="Sense strand starting at position 2057 of SEQ ID NO: 2324"
augaauugcuaucaguaaa

SEQ ID NO: 5460 - RNA, 19 nt, Artificial Sequence
  source: /note="Description of Artificial Sequence: Synthetic oligonucleotide"
  source: /note="Antisense strand to SEQ ID NO: 5459"
uuuacugauagcaauucau

SEQ ID NO: 5461 - RNA, 19 nt, Artificial Sequence
  source: /note="Description of Artificial Sequence: Synthetic oligonucleotide"
  source: /note="Sense strand starting at position 2057 of SEQ ID NO: 2335"
ucaguaaaguccuguacca

SEQ ID NO: 5462 - RNA, 19 nt, Artificial Sequence
  source: /note="Description of Artificial Sequence: Synthetic oligonucleotide"
  source: /note="Antisense strand to SEQ ID NO: 5461"
ugguacaggacuuuacuga

SEQ ID NO: 5463 - RNA, 19 nt, Artificial Sequence
  source: /note="Description of Artificial Sequence: Synthetic oligonucleotide"
  source: /note="Sense strand starting at position 2057 of SEQ ID NO: 2428"
uuaacucauuguggugagu

SEQ ID NO: 5464 - RNA, 19 nt, Artificial Sequence
  source: /note="Description of Artificial Sequence: Synthetic oligonucleotide"
  source: /note="Antisense strand to SEQ ID NO: 5463"
acucaccacaaugaguuaa

SEQ ID NO: 5465 - RNA, 19 nt, Artificial Sequence
  source: /note="Description of Artificial Sequence: Synthetic oligonucleotide"
  source: /note="Sense strand starting at position 2057 of SEQ ID NO: 2430"
aacucauuguggugaguag

SEQ ID NO: 5466 - RNA, 19 nt, Artificial Sequence
  source: /note="Description of Artificial Sequence: Synthetic oligonucleotide"
  source: /note="Antisense strand to SEQ ID NO: 5465"
cuacucaccacaaugaguu

SEQ ID NO: 5467 - RNA, 19 nt, Artificial Sequence
  source: /note="Description of Artificial Sequence: Synthetic oligonucleotide"
  source: /note="Sense strand starting at position 2057 of SEQ ID NO: 2524"
uguaaagaguguuuauguu

SEQ ID NO: 5468 - RNA, 19 nt, Artificial Sequence
  source: /note="Description of Artificial Sequence: Synthetic oligonucleotide"
  source: /note="Antisense strand to SEQ ID NO: 5467"
aacauaaacacucuuuaca

SEQ ID NO: 5469 - RNA, 19 nt, Artificial Sequence
  source: /note="Description of Artificial Sequence: Synthetic oligonucleotide"
  source: /note="Sense strand starting at position 2057 of SEQ ID NO: 2549"
agaucuuguuugugagcaa

SEQ ID NO: 5470 - RNA, 19 nt, Artificial Sequence
  source: /note="Description of Artificial Sequence: Synthetic oligonucleotide"
  source: /note="Antisense strand to SEQ ID NO: 5469"
uugcucacaaacaagaucu

SEQ ID NO: 5471 - RNA, 19 nt, Artificial Sequence
  source: /note="Description of Artificial Sequence: Synthetic oligonucleotide"
  source: /note="Sense strand starting at position 2057 of SEQ ID NO: 2550"
gaucuuguuugugagcaag

SEQ ID NO: 5472 - RNA, 19 nt, Artificial Sequence
  source: /note="Description of Artificial Sequence: Synthetic oligonucleotide"
  source: /note="Antisense strand to SEQ ID NO: 5471"
cuugcucacaaacaagauc

SEQ ID NO: 5473 - RNA, 19 nt, Artificial Sequence
  source: /note="Description of Artificial Sequence: Synthetic oligonucleotide"
  source: /note="Sense strand starting at position 2057 of SEQ ID NO: 2552"
ucuuguuugugagcaaggu

SEQ ID NO: 5474 - RNA, 19 nt, Artificial Sequence
  source: /note="Description of Artificial Sequence: Synthetic oligonucleotide"
  source: /note="Antisense strand to SEQ ID NO: 5473"
accuugcucacaaacaaga

SEQ ID NO: 5475 - RNA, 19 nt, Artificial Sequence
  source: /note="Description of Artificial Sequence: Synthetic oligonucleotide"
  source: /note="Sense strand starting at position 2057 of SEQ ID NO: 2561"
ugagcaagguaauaggaua

SEQ ID NO: 5476 - RNA, 19 nt, Artificial Sequence
  source: /note="Description of Artificial Sequence: Synthetic oligonucleotide"
  source: /note="Antisense strand to SEQ ID NO: 5475"
uauccuauuaccuugcuca

SEQ ID NO: 5477 - RNA, 19 nt, Artificial Sequence
  source: /note="Description of Artificial Sequence: Synthetic oligonucleotide"
  source: /note="Sense strand starting at position 2057 of SEQ ID NO: 2569"
guaauaggauaucaaauuc

SEQ ID NO: 5478 - RNA, 19 nt, Artificial Sequence
  source: /note="Description of Artificial Sequence: Synthetic oligonucleotide"
  source: /note="Antisense strand to SEQ ID NO: 5477"
gaauuugauauccuauuac

SEQ ID NO: 5479 - RNA, 19 nt, Artificial Sequence
  source: /note="Description of Artificial Sequence: Synthetic oligonucleotide"
  source: /note="Sense strand starting at position 2057 of SEQ ID NO: 2596"
guggguuaaacugguugua

SEQ ID NO: 5480 - RNA, 19 nt, Artificial Sequence
  source: /note="Description of Artificial Sequence: Synthetic oligonucleotide"
  source: /note="Antisense strand to SEQ ID NO: 5479"
uacaaccaguuuaacccac

SEQ ID NO: 5481 - RNA, 19 nt, Artificial Sequence
  source: /note="Description of Artificial Sequence: Synthetic oligonucleotide"
  source: /note="Sense strand starting at position 2057 of SEQ ID NO: 2661"
gcagaucucugccuauggu

SEQ ID NO: 5482 - RNA, 19 nt, Artificial Sequence
  source: /note="Description of Artificial Sequence: Synthetic oligonucleotide"
  source: /note="Antisense strand to SEQ ID NO: 5481"
accauaggcagagaucugc

SEQ ID NO: 5483 - RNA, 19 nt, Artificial Sequence
  source: /note="Description of Artificial Sequence: Synthetic oligonucleotide"
  source: /note="Sense strand starting at position 2057 of SEQ ID NO: 2678"
guggguugccgauaaaugu

SEQ ID NO: 5484 - RNA, 19 nt, Artificial Sequence
  source: /note="Description of Artificial Sequence: Synthetic oligonucleotide"
  source: /note="Antisense strand to SEQ ID NO: 5483"
acauuuaucggcaacccac

SEQ ID NO: 5485 - RNA, 19 nt, Artificial Sequence
  source: /note="Description of Artificial Sequence: Synthetic oligonucleotide"
  source: /note="Sense strand starting at position 2057 of SEQ ID NO: 2682"
guugccgauaaaugucaga

SEQ ID NO: 5486 - RNA, 19 nt, Artificial Sequence
  source: /note="Description of Artificial Sequence: Synthetic oligonucleotide"
  source: /note="Antisense strand to SEQ ID NO: 5485"
ucugacauuuaucggcaac

SEQ ID NO: 5487 - RNA, 19 nt, Artificial Sequence
  source: /note="Description of Artificial Sequence: Synthetic oligonucleotide"
  source: /note="Sense strand starting at position 2057 of SEQ ID NO: 2685"
gccgauaaaugucagaugu

SEQ ID NO: 5488 - RNA, 19 nt, Artificial Sequence
  source: /note="Description of Artificial Sequence: Synthetic oligonucleotide"
  source: /note="Antisense strand to SEQ ID NO: 5487"
acaucugacauuuaucggc

SEQ ID NO: 5489 - RNA, 19 nt, Artificial Sequence
  source: /note="Description of Artificial Sequence: Synthetic oligonucleotide"
  source: /note="Sense strand starting at position 2057 of SEQ ID NO: 2687"
cgauaaaugucagaugugu

SEQ ID NO: 5490 - RNA, 19 nt, Artificial Sequence
  source: /note="Description of Artificial Sequence: Synthetic oligonucleotide"
  source: /note="Antisense strand to SEQ ID NO: 5489"
acacaucugacauuuaucg

SEQ ID NO: 5491 - RNA, 19 nt, Artificial Sequence
  source: /note="Description of Artificial Sequence: Synthetic oligonucleotide"
  source: /note="Sense strand starting at position 2057 of SEQ ID NO: 2839"
gauaaucuguguuagacuu

SEQ ID NO: 5492 - RNA, 19 nt, Artificial Sequence
  source: /note="Description of Artificial Sequence: Synthetic oligonucleotide"
  source: /note="Antisense strand to SEQ ID NO: 5491"
aagucuaacacagauuauc

SEQ ID NO: 5493 - RNA, 19 nt, Artificial Sequence
  source: /note="Description of Artificial Sequence: Synthetic oligonucleotide"
  source: /note="Sense strand starting at position 2057 of SEQ ID NO: 2938"
aaaugugugcaaugcaagu

SEQ ID NO: 5494 - RNA, 19 nt, Artificial Sequence
  source: /note="Description of Artificial Sequence: Synthetic oligonucleotide"
  source: /note="Antisense strand to SEQ ID NO: 5493"
acuugcauugcacacauuu

SEQ ID NO: 5495 - RNA, 19 nt, Artificial Sequence
  source: /note="Description of Artificial Sequence: Synthetic oligonucleotide"
  source: /note="Sense strand starting at position 2057 of SEQ ID NO: 2940"
augugugcaaugcaaguua

SEQ ID NO: 5496 - RNA, 19 nt, Artificial Sequence
  source: /note="Description of Artificial Sequence: Synthetic oligonucleotide"
  source: /note="Antisense strand to SEQ ID NO: 5495"
uaacuugcauugcacacau

SEQ ID NO: 5497 - RNA, 19 nt, Artificial Sequence
  source: /note="Description of Artificial Sequence: Synthetic oligonucleotide"
  source: /note="Sense strand starting at position 2057 of SEQ ID NO: 3006"
ugaguauggugauauagua

SEQ ID NO: 5498 - RNA, 19 nt, Artificial Sequence
  source: /note="Description of Artificial Sequence: Synthetic oligonucleotide"
  source: /note="Antisense strand to SEQ ID NO: 5497"
uacuauaucaccauacuca

SEQ ID NO: 5499 - RNA, 19 nt, Artificial Sequence
  source: /note="Description of Artificial Sequence: Synthetic oligonucleotide"
  source: /note="Sense strand starting at position 2057 of SEQ ID NO: 3071"
gugguuugauaugaguugu

SEQ ID NO: 5500 - RNA, 19 nt, Artificial Sequence
  source: /note="Description of Artificial Sequence: Synthetic oligonucleotide"
  source: /note="Antisense strand to SEQ ID NO: 5499"
acaacucauaucaaaccac

SEQ ID NO: 5501 - RNA, 19 nt, Artificial Sequence
  source: /note="Description of Artificial Sequence: Synthetic oligonucleotide"
  source: /note="Sense strand starting at position 2057 of SEQ ID NO: 3085"
guuguuggcuaauauguau

SEQ ID NO: 5502 - RNA, 19 nt, Artificial Sequence
  source: /note="Description of Artificial Sequence: Synthetic oligonucleotide"
  source: /note="Antisense strand to SEQ ID NO: 5501"
auacauauuagccaacaac

SEQ ID NO: 5503 - RNA, 19 nt, Artificial Sequence
  source: /note="Description of Artificial Sequence: Synthetic oligonucleotide"
  source: /note="Sense strand starting at position 2057 of SEQ ID NO: 3098"
auguauaauuccugaggua

SEQ ID NO: 5504 - RNA, 19 nt, Artificial Sequence
  source: /note="Description of Artificial Sequence: Synthetic oligonucleotide"
  source: /note="Antisense strand to SEQ ID NO: 5503"
uaccucaggaauuauacau

SEQ ID NO: 5505 - RNA, 19 nt, Artificial Sequence
  source: /note="Description of Artificial Sequence: Synthetic oligonucleotide"
  source: /note="Sense strand starting at position 2057 of SEQ ID NO: 3168"
gcucuuagcugggaaaccu

SEQ ID NO: 5506 - RNA, 19 nt, Artificial Sequence
  source: /note="Description of Artificial Sequence: Synthetic oligonucleotide"
  source: /note="Antisense strand to SEQ ID NO: 5505"
agguuucccagcuaagagc

SEQ ID NO: 5507 - RNA, 19 nt, Artificial Sequence
  source: /note="Description of Artificial Sequence: Synthetic oligonucleotide"
  source: /note="Sense strand starting at position 2057 of SEQ ID NO: 3206"
uaaguagagugaggaaaua

SEQ ID NO: 5508 - RNA, 19 nt, Artificial Sequence
  source: /note="Description of Artificial Sequence: Synthetic oligonucleotide"
  source: /note="Antisense strand to SEQ ID NO: 5507"
uauuuccucacucuacuua

SEQ ID NO: 5509 - RNA, 19 nt, Artificial Sequence
  source: /note="Description of Artificial Sequence: Synthetic oligonucleotide"
  source: /note="Sense strand starting at position 2057 of SEQ ID NO: 3232"
uuagaucuaugagggaaca

SEQ ID NO: 5510 - RNA, 19 nt, Artificial Sequence
  source: /note="Description of Artificial Sequence: Synthetic oligonucleotide"
  source: /note="Antisense strand to SEQ ID NO: 5509"
uguucccucauagaucuaa

SEQ ID NO: 5511 - RNA, 19 nt, Artificial Sequence
  source: /note="Description of Artificial Sequence: Synthetic oligonucleotide"
  source: /note="Sense strand starting at position 2057 of SEQ ID NO: 3313"
ugauaugccugacauagag

SEQ ID NO: 5512 - RNA, 19 nt, Artificial Sequence
  source: /note="Description of Artificial Sequence: Synthetic oligonucleotide"
  source: /note="Antisense strand to SEQ ID NO: 5511"
cucuaugucaggcauauca

SEQ ID NO: 5513 - RNA, 19 nt, Artificial Sequence
  source: /note="Description of Artificial Sequence: Synthetic oligonucleotide"
  source: /note="Sense strand starting at position 2057 of SEQ ID NO: 3694"
ugauuauggugcuaggcuu

SEQ ID NO: 5514 - RNA, 19 nt, Artificial Sequence
  source: /note="Description of Artificial Sequence: Synthetic oligonucleotide"
  source: /note="Antisense strand to SEQ ID NO: 5513"
aagccuagcaccauaauca

SEQ ID NO: 5515 - RNA, 19 nt, Artificial Sequence
  source: /note="Description of Artificial Sequence: Synthetic oligonucleotide"
  source: /note="Sense strand starting at position 2057 of SEQ ID NO: 3729"
gcuaauguaugugaaacaa

SEQ ID NO: 5516 - RNA, 19 nt, Artificial Sequence
  source: /note="Description of Artificial Sequence: Synthetic oligonucleotide"
  source: /note="Antisense strand to SEQ ID NO: 5515"
uuguuucacauacauuagc

SEQ ID NO: 5517 - RNA, 19 nt, Artificial Sequence
  source: /note="Description of Artificial Sequence: Synthetic oligonucleotide"
  source: /note="Sense strand starting at position 2057 of SEQ ID NO: 3946"
augugucccucccuguaua

SEQ ID NO: 5518 - RNA, 19 nt, Artificial Sequence
  source: /note="Description of Artificial Sequence: Synthetic oligonucleotide"
  source: /note="Antisense strand to SEQ ID NO: 5517"
uauacagggagggacacau

SEQ ID NO: 5519 - RNA, 19 nt, Artificial Sequence
  source: /note="Description of Artificial Sequence: Synthetic oligonucleotide"
  source: /note="Sense strand starting at position 2059 of SEQ ID NO: 33"
ucaacuguguugcuugaaa

SEQ ID NO: 5520 - RNA, 19 nt, Artificial Sequence
  source: /note="Description of Artificial Sequence: Synthetic oligonucleotide"
  source: /note="Antisense strand to SEQ ID NO: 5519"
uuucaagcaacacaguuga

SEQ ID NO: 5521 - RNA, 19 nt, Artificial Sequence
  source: /note="Description of Artificial Sequence: Synthetic oligonucleotide"
  source: /note="Sense strand starting at position 2059 of SEQ ID NO: 35"
aacuguguugcuugaaauc

SEQ ID NO: 5522 - RNA, 19 nt, Artificial Sequence
  source: /note="Description of Artificial Sequence: Synthetic oligonucleotide"
  source: /note="Antisense strand to SEQ ID NO: 5521"
gauuucaagcaacacaguu

SEQ ID NO: 5523 - RNA, 19 nt, Artificial Sequence
  source: /note="Description of Artificial Sequence: Synthetic oligonucleotide"
  source: /note="Sense strand starting at position 2059 of SEQ ID NO: 44"
gcuugaaaucagggucucu

SEQ ID NO: 5524 - RNA, 19 nt, Artificial Sequence
  source: /note="Description of Artificial Sequence: Synthetic oligonucleotide"
  source: /note="Antisense strand to SEQ ID NO: 5523"
agagacccugauuucaagc

SEQ ID NO: 5525 - RNA, 19 nt, Artificial Sequence
  source: /note="Description of Artificial Sequence: Synthetic oligonucleotide"
  source: /note="Sense strand starting at position 2059 of SEQ ID NO: 55"
gggucucuuuacuaaauca

SEQ ID NO: 5526 - RNA, 19 nt, Artificial Sequence
  source: /note="Description of Artificial Sequence: Synthetic oligonucleotide"
  source: /note="Antisense strand to SEQ ID NO: 5525"
ugauuuaguaaagagaccc

SEQ ID NO: 5527 - RNA, 19 nt, Artificial Sequence
  source: /note="Description of Artificial Sequence: Synthetic oligonucleotide"
  source: /note="Sense strand starting at position 2059 of SEQ ID NO: 186"
ucuaguaccugggacuaaa

SEQ ID NO: 5528 - RNA, 19 nt, Artificial Sequence
  source: /note="Description of Artificial Sequence: Synthetic oligonucleotide"
  source: /note="Antisense strand to SEQ ID NO: 5527"
uuuagucccagguacuaga

SEQ ID NO: 5529 - RNA, 19 nt, Artificial Sequence
  source: /note="Description of Artificial Sequence: Synthetic oligonucleotide"
  source: /note="Sense strand starting at position 2059 of SEQ ID NO: 323"
gugcuaggauuacacgaaa

SEQ ID NO: 5530 - RNA, 19 nt, Artificial Sequence
  source: /note="Description of Artificial Sequence: Synthetic oligonucleotide"
  source: /note="Antisense strand to SEQ ID NO: 5529"
uuucguguaauccuagcac

SEQ ID NO: 5531 - RNA, 19 nt, Artificial Sequence
  source: /note="Description of Artificial Sequence: Synthetic oligonucleotide"
  source: /note="Sense strand starting at position 2059 of SEQ ID NO: 770"
uuaugcuagaaguguuaag

SEQ ID NO: 5532 - RNA, 19 nt, Artificial Sequence
  source: /note="Description of Artificial Sequence: Synthetic oligonucleotide"
  source: /note="Antisense strand to SEQ ID NO: 5531"
cuuaacacuucuagcauaa

SEQ ID NO: 5533 - RNA, 19 nt, Artificial Sequence
  source: /note="Description of Artificial Sequence: Synthetic oligonucleotide"
  source: /note="Sense strand starting at position 2059 of SEQ ID NO: 779"
aaguguuaaguuugugucu

SEQ ID NO: 5534 - RNA, 19 nt, Artificial Sequence
  source: /note="Description of Artificial Sequence: Synthetic oligonucleotide"
  source: /note="Antisense strand to SEQ ID NO: 5533"
agacacaaacuuaacacuu

SEQ ID NO: 5535 - RNA, 19 nt, Artificial Sequence
  source: /note="Description of Artificial Sequence: Synthetic oligonucleotide"
  source: /note="Sense strand starting at position 2059 of SEQ ID NO: 781"
guguuaaguuugugucuca

SEQ ID NO: 5536 - RNA, 19 nt, Artificial Sequence
  source: /note="Description of Artificial Sequence: Synthetic oligonucleotide"
  source: /note="Antisense strand to SEQ ID NO: 5535"
ugagacacaaacuuaacac

SEQ ID NO: 5537 - RNA, 19 nt, Artificial Sequence
  source: /note="Description of Artificial Sequence: Synthetic oligonucleotide"
  source: /note="Sense strand starting at position 2059 of SEQ ID NO: 782"
uguuaaguuugugucucaa

SEQ ID NO: 5538 - RNA, 19 nt, Artificial Sequence
  source: /note="Description of Artificial Sequence: Synthetic oligonucleotide"
  source: /note="Antisense strand to SEQ ID NO: 5537"
uugagacacaaacuuaaca

SEQ ID NO: 5539 - RNA, 19 nt, Artificial Sequence
  source: /note="Description of Artificial Sequence: Synthetic oligonucleotide"
  source: /note="Sense strand starting at position 2059 of SEQ ID NO: 784"
uuaaguuugugucucaaua

SEQ ID NO: 5540 - RNA, 19 nt, Artificial Sequence
  source: /note="Description of Artificial Sequence: Synthetic oligonucleotide"
  source: /note="Antisense strand to SEQ ID NO: 5539"
uauugagacacaaacuuaa

SEQ ID NO: 5541 - RNA, 19 nt, Artificial Sequence
  source: /note="Description of Artificial Sequence: Synthetic oligonucleotide"
  source: /note="Sense strand starting at position 2059 of SEQ ID NO: 822"
gcauguuuagcccaaacac

SEQ ID NO: 5542 - RNA, 19 nt, Artificial Sequence
  source: /note="Description of Artificial Sequence: Synthetic oligonucleotide"
  source: /note="Antisense strand to SEQ ID NO: 5541"
guguuugggcuaaacaugc

SEQ ID NO: 5543 - RNA, 19 nt, Artificial Sequence
  source: /note="Description of Artificial Sequence: Synthetic oligonucleotide"
  source: /note="Sense strand starting at position 2059 of SEQ ID NO: 853"
agagcaagauuagaauaaa

SEQ ID NO: 5544 - RNA, 19 nt, Artificial Sequence
  source: /note="Description of Artificial Sequence: Synthetic oligonucleotide"
  source: /note="Antisense strand to SEQ ID NO: 5543"
uuuauucuaaucuugcucu

SEQ ID NO: 5545 - RNA, 19 nt, Artificial Sequence
  source: /note="Description of Artificial Sequence: Synthetic oligonucleotide"
  source: /note="Sense strand starting at position 2059 of SEQ ID NO: 952"
acagccacguucuuuaaau

SEQ ID NO: 5546 - RNA, 19 nt, Artificial Sequence
  source: /note="Description of Artificial Sequence: Synthetic oligonucleotide"
  source: /note="Antisense strand to SEQ ID NO: 5545"
auuuaaagaacguggcugu

SEQ ID NO: 5547 - RNA, 19 nt, Artificial Sequence
  source: /note="Description of Artificial Sequence: Synthetic oligonucleotide"
  source: /note="Sense strand starting at position 2059 of SEQ ID NO: 971"
uuugcaagcugugacuaua

SEQ ID NO: 5548 - RNA, 19 nt, Artificial Sequence
  source: /note="Description of Artificial Sequence: Synthetic oligonucleotide"
  source: /note="Antisense strand to SEQ ID NO: 5547"
uauagucacagcuugcaaa

SEQ ID NO: 5549 - RNA, 19 nt, Artificial Sequence
  source: /note="Description of Artificial Sequence: Synthetic oligonucleotide"
  source: /note="Sense strand starting at position 2059 of SEQ ID NO: 2300"
gccggaacagcucaaguuu

SEQ ID NO: 5550 - RNA, 19 nt, Artificial Sequence
  source: /note="Description of Artificial Sequence: Synthetic oligonucleotide"
  source: /note="Antisense strand to SEQ ID NO: 5549"
aaacuugagcuguuccggc

SEQ ID NO: 5551 - RNA, 19 nt, Artificial Sequence
  source: /note="Description of Artificial Sequence: Synthetic oligonucleotide"
  source: /note="Sense strand starting at position 2059 of SEQ ID NO: 2317"
uuugguccgcccugggaau

SEQ ID NO: 5552 - RNA, 19 nt, Artificial Sequence
  source: /note="Description of Artificial Sequence: Synthetic oligonucleotide"
  source: /note="Antisense strand to SEQ ID NO: 5551"
auucccagggcggaccaaa

SEQ ID NO: 5553 - RNA, 19 nt, Artificial Sequence
  source: /note="Description of Artificial Sequence: Synthetic oligonucleotide"
  source: /note="Sense strand starting at position 2059 of SEQ ID NO: 2338"
ccacgucuuccugaagugu

SEQ ID NO: 5554 - RNA, 19 nt, Artificial Sequence
  source: /note="Description of Artificial Sequence: Synthetic oligonucleotide"
  source: /note="Antisense strand to SEQ ID NO: 5553"
acacuucaggaagacgugg

SEQ ID NO: 5555 - RNA, 19 nt, Artificial Sequence
  source: /note="Description of Artificial Sequence: Synthetic oligonucleotide"
  source: /note="Sense strand starting at position 2059 of SEQ ID NO: 2366"
cugccuuagccuugucuau

SEQ ID NO: 5556 - RNA, 19 nt, Artificial Sequence
  source: /note="Description of Artificial Sequence: Synthetic oligonucleotide"
  source: /note="Antisense strand to SEQ ID NO: 5555"
auagacaaggcuaaggcag

SEQ ID NO: 5557 - RNA, 19 nt, Artificial Sequence
  source: /note="Description of Artificial Sequence: Synthetic oligonucleotide"
  source: /note="Sense strand starting at position 2059 of SEQ ID NO: 2368"
gccuuagccuugucuauau

SEQ ID NO: 5558 - RNA, 19 nt, Artificial Sequence
  source: /note="Description of Artificial Sequence: Synthetic oligonucleotide"
  source: /note="Antisense strand to SEQ ID NO: 5557"
auauagacaaggcuaaggc

SEQ ID NO: 5559 - RNA, 19 nt, Artificial Sequence
  source: /note="Description of Artificial Sequence: Synthetic oligonucleotide"
  source: /note="Sense strand starting at position 2059 of SEQ ID NO: 2383"
auauuuagcuaaggguuaa

SEQ ID NO: 5560 - RNA, 19 nt, Artificial Sequence
  source: /note="Description of Artificial Sequence: Synthetic oligonucleotide"
  source: /note="Antisense strand to SEQ ID NO: 5559"
uuaacccuuagcuaaauau

SEQ ID NO: 5561 - RNA, 19 nt, Artificial Sequence
  source: /note="Description of Artificial Sequence: Synthetic oligonucleotide"
  source: /note="Sense strand starting at position 2059 of SEQ ID NO: 2443"
guuggauagucguucuguu

SEQ ID NO: 5562 - RNA, 19 nt, Artificial Sequence
  source: /note="Description of Artificial Sequence: Synthetic oligonucleotide"
  source: /note="Antisense strand to SEQ ID NO: 5561"
aacagaacgacuauccaac

SEQ ID NO: 5563 - RNA, 19 nt, Artificial Sequence
  source: /note="Description of Artificial Sequence: Synthetic oligonucleotide"
  source: /note="Sense strand starting at position 2059 of SEQ ID NO: 2464"
guuaauaaguaggaagaga

SEQ ID NO: 5564 - RNA, 19 nt, Artificial Sequence
  source: /note="Description of Artificial Sequence: Synthetic oligonucleotide"
  source: /note="Antisense strand to SEQ ID NO: 5563"
ucucuuccuacuuauuaac

SEQ ID NO: 5565 - RNA, 19 nt, Artificial Sequence
  source: /note="Description of Artificial Sequence: Synthetic oligonucleotide"
  source: /note="Sense strand starting at position 2059 of SEQ ID NO: 2602"
ucacuuguagggugguaua

SEQ ID NO: 5566 - RNA, 19 nt, Artificial Sequence
  source: /note="Description of Artificial Sequence: Synthetic oligonucleotide"
  source: /note="Antisense strand to SEQ ID NO: 5565"
uauaccacccuacaaguga

SEQ ID NO: 5567 - RNA, 19 nt, Artificial Sequence
  source: /note="Description of Artificial Sequence: Synthetic oligonucleotide"
  source: /note="Sense strand starting at position 2059 of SEQ ID NO: 2605"
cuuguagggugguauacau

SEQ ID NO: 5568 - RNA, 19 nt, Artificial Sequence
  source: /note="Description of Artificial Sequence: Synthetic oligonucleotide"
  source: /note="Antisense strand to SEQ ID NO: 5567"
auguauaccacccuacaag

SEQ ID NO: 5569 - RNA, 19 nt, Artificial Sequence
  source: /note="Description of Artificial Sequence: Synthetic oligonucleotide"
  source: /note="Sense strand starting at position 2059 of SEQ ID NO: 2714"
gcuucaaacgugugugaau

SEQ ID NO: 5570 - RNA, 19 nt, Artificial Sequence
  source: /note="Description of Artificial Sequence: Synthetic oligonucleotide"
  source: /note="Antisense strand to SEQ ID NO: 5569"
auucacacacguuugaagc

SEQ ID NO: 5571 - RNA, 19 nt, Artificial Sequence
  source: /note="Description of Artificial Sequence: Synthetic oligonucleotide"
  source: /note="Sense strand starting at position 2059 of SEQ ID NO: 2768"
auggguuuguugggucagu

SEQ ID NO: 5572 - RNA, 19 nt, Artificial Sequence
  source: /note="Description of Artificial Sequence: Synthetic oligonucleotide"
  source: /note="Antisense strand to SEQ ID NO: 5571"
acugacccaacaaacccau

SEQ ID NO: 5573 - RNA, 19 nt, Artificial Sequence
  source: /note="Description of Artificial Sequence: Synthetic oligonucleotide"
  source: /note="Sense strand starting at position 2059 of SEQ ID NO: 2769"
uggguuuguugggucagua

SEQ ID NO: 5574 - RNA, 19 nt, Artificial Sequence
  source: /note="Description of Artificial Sequence: Synthetic oligonucleotide"
  source: /note="Antisense strand to SEQ ID NO: 5573"
uacugacccaacaaaccca

SEQ ID NO: 5575 - RNA, 19 nt, Artificial Sequence
  source: /note="Description of Artificial Sequence: Synthetic oligonucleotide"
  source: /note="Sense strand starting at position 2059 of SEQ ID NO: 2824"
acaucugcccuugguuaaa

SEQ ID NO: 5576 - RNA, 19 nt, Artificial Sequence
  source: /note="Description of Artificial Sequence: Synthetic oligonucleotide"
  source: /note="Antisense strand to SEQ ID NO: 5575"
uuuaaccaagggcagaugu

SEQ ID NO: 5577 - RNA, 19 nt, Artificial Sequence
  source: /note="Description of Artificial Sequence: Synthetic oligonucleotide"
  source: /note="Sense strand starting at position 2059 of SEQ ID NO: 2855"
uccuuucuagcgugagcua

SEQ ID NO: 5578 - RNA, 19 nt, Artificial Sequence
  source: /note="Description of Artificial Sequence: Synthetic oligonucleotide"
  source: /note="Antisense strand to SEQ ID NO: 5577"
uagcucacgcuagaaagga

SEQ ID NO: 5579 - RNA, 19 nt, Artificial Sequence
  source: /note="Description of Artificial Sequence: Synthetic oligonucleotide"
  source: /note="Sense strand starting at position 2059 of SEQ ID NO: 2856"
ccuuucuagcgugagcuau

SEQ ID NO: 5580 - RNA, 19 nt, Artificial Sequence
  source: /note="Description of Artificial Sequence: Synthetic oligonucleotide"
  source: /note="Antisense strand to SEQ ID NO: 5579"
auagcucacgcuagaaagg

SEQ ID NO: 5581 - RNA, 19 nt, Artificial Sequence
  source: /note="Description of Artificial Sequence: Synthetic oligonucleotide"
  source: /note="Sense strand starting at position 2059 of SEQ ID NO: 2864"
gcgugagcuaucuagccgu

SEQ ID NO: 5582 - RNA, 19 nt, Artificial Sequence
  source: /note="Description of Artificial Sequence: Synthetic oligonucleotide"
  source: /note="Antisense strand to SEQ ID NO: 5581"
acggcuagauagcucacgc

SEQ ID NO: 5583 - RNA, 19 nt, Artificial Sequence
  source: /note="Description of Artificial Sequence: Synthetic oligonucleotide"
  source: /note="Sense strand starting at position 2059 of SEQ ID NO: 2874"
ucuagccguuucuaaacuu

SEQ ID NO: 5584 - RNA, 19 nt, Artificial Sequence
  source: /note="Description of Artificial Sequence: Synthetic oligonucleotide"
  source: /note="Antisense strand to SEQ ID NO: 5583"
aaguuuagaaacggcuaga

SEQ ID NO: 5585 - RNA, 19 nt, Artificial Sequence
  source: /note="Description of Artificial Sequence: Synthetic oligonucleotide"
  source: /note="Sense strand starting at position 2059 of SEQ ID NO: 2904"
ugucuuaaaugguaauaag

SEQ ID NO: 5586 - RNA, 19 nt, Artificial Sequence
  source: /note="Description of Artificial Sequence: Synthetic oligonucleotide"
  source: /note="Antisense strand to SEQ ID NO: 5585"
cuuauuaccauuuaagaca

SEQ ID NO: 5587 - RNA, 19 nt, Artificial Sequence
  source: /note="Description of Artificial Sequence: Synthetic oligonucleotide"
  source: /note="Sense strand starting at position 2059 of SEQ ID NO: 3100"
gccaguguuuguuauggca

SEQ ID NO: 5588 - RNA, 19 nt, Artificial Sequence
  source: /note="Description of Artificial Sequence: Synthetic oligonucleotide"
  source: /note="Antisense strand to SEQ ID NO: 5587"
ugccauaacaaacacuggc

SEQ ID NO: 5589 - RNA, 19 nt, Artificial Sequence
  source: /note="Description of Artificial Sequence: Synthetic oligonucleotide"
  source: /note="Sense strand starting at position 2059 of SEQ ID NO: 3102"
caguguuuguuauggcauc

SEQ ID NO: 5590 - RNA, 19 nt, Artificial Sequence
  source: /note="Description of Artificial Sequence: Synthetic oligonucleotide"
  source: /note="Antisense strand to SEQ ID NO: 5589"
gaugccauaacaaacacug

SEQ ID NO: 5591 - RNA, 19 nt, Artificial Sequence
  source: /note="Description of Artificial Sequence: Synthetic oligonucleotide"
  source: /note="Sense strand starting at position 2059 of SEQ ID NO: 3134"
gcguuucuaucuguuuaaa

SEQ ID NO: 5592 - RNA, 19 nt, Artificial Sequence
  source: /note="Description of Artificial Sequence: Synthetic oligonucleotide"
  source: /note="Antisense strand to SEQ ID NO: 5591"
uuuaaacagauagaaacgc

SEQ ID NO: 5593 - RNA, 19 nt, Artificial Sequence
  source: /note="Description of Artificial Sequence: Synthetic oligonucleotide"
  source: /note="Sense strand starting at position 2059 of SEQ ID NO: 3136"
guuucuaucuguuuaaagg

SEQ ID NO: 5594 - RNA, 19 nt, Artificial Sequence
  source: /note="Description of Artificial Sequence: Synthetic oligonucleotide"
  source: /note="Antisense strand to SEQ ID NO: 5593"
ccuuuaaacagauagaaac

SEQ ID NO: 5595 - RNA, 19 nt, Artificial Sequence
  source: /note="Description of Artificial Sequence: Synthetic oligonucleotide"
  source: /note="Sense strand starting at position 2059 of SEQ ID NO: 3151"
aaggaccucuacgaguuua

SEQ ID NO: 5596 - RNA, 19 nt, Artificial Sequence
  source: /note="Description of Artificial Sequence: Synthetic oligonucleotide"
  source: /note="Antisense strand to SEQ ID NO: 5595"
uaaacucguagagguccuu

SEQ ID NO: 5597 - RNA, 19 nt, Artificial Sequence
  source: /note="Description of Artificial Sequence: Synthetic oligonucleotide"
  source: /note="Sense strand starting at position 2059 of SEQ ID NO: 3213"
gcaucaauuaccugcguga

SEQ ID NO: 5598 - RNA, 19 nt, Artificial Sequence
  source: /note="Description of Artificial Sequence: Synthetic oligonucleotide"
  source: /note="Antisense strand to SEQ ID NO: 5597"
ucacgcagguaauugaugc

SEQ ID NO: 5599 - RNA, 19 nt, Artificial Sequence
  source: /note="Description of Artificial Sequence: Synthetic oligonucleotide"
  source: /note="Sense strand starting at position 2059 of SEQ ID NO: 3215"
aucaauuaccugcgugacu

SEQ ID NO: 5600 - RNA, 19 nt, Artificial Sequence
  source: /note="Description of Artificial Sequence: Synthetic oligonucleotide"
  source: /note="Antisense strand to SEQ ID NO: 5599"
agucacgcagguaauugau

SEQ ID NO: 5601 - RNA, 19 nt, Artificial Sequence
  source: /note="Description of Artificial Sequence: Synthetic oligonucleotide"
  source: /note="Sense strand starting at position 2059 of SEQ ID NO: 3216"
ucaauuaccugcgugacuu

SEQ ID NO: 5602 - RNA, 19 nt, Artificial Sequence
  source: /note="Description of Artificial Sequence: Synthetic oligonucleotide"
  source: /note="Antisense strand to SEQ ID NO: 5601"
aagucacgcagguaauuga

SEQ ID NO: 5603 - RNA, 19 nt, Artificial Sequence
  source: /note="Description of Artificial Sequence: Synthetic oligonucleotide"
  source: /note="Sense strand starting at position 2059 of SEQ ID NO: 3217"
caauuaccugcgugacuuu

SEQ ID NO: 5604 - RNA, 19 nt, Artificial Sequence
  source: /note="Description of Artificial Sequence: Synthetic oligonucleotide"
  source: /note="Antisense strand to SEQ ID NO: 5603"
aaagucacgcagguaauug

SEQ ID NO: 5605 - RNA, 19 nt, Artificial Sequence
  source: /note="Description of Artificial Sequence: Synthetic oligonucleotide"
  source: /note="Sense strand starting at position 2059 of SEQ ID NO: 3287"
cuggaaauauaucgcuaag

SEQ ID NO: 5606 - RNA, 19 nt, Artificial Sequence
  source: /note="Description of Artificial Sequence: Synthetic oligonucleotide"
  source: /note="Antisense strand to SEQ ID NO: 5605"
cuuagcgauauauuuccag

SEQ ID NO: 5607 - RNA, 19 nt, Artificial Sequence
  source: /note="Description of Artificial Sequence: Synthetic oligonucleotide"
  source: /note="Sense strand starting at position 2059 of SEQ ID NO: 3937"
accaaauccuguuguccuu

SEQ ID NO: 5608 - RNA, 19 nt, Artificial Sequence
  source: /note="Description of Artificial Sequence: Synthetic oligonucleotide"
  source: /note="Antisense strand to SEQ ID NO: 5607"
aaggacaacaggauuuggu

SEQ ID NO: 5609 - RNA, 19 nt, Artificial Sequence
  source: /note="Description of Artificial Sequence: Synthetic oligonucleotide"
  source: /note="Sense strand starting at position 2058 of SEQ ID NO: 340"
gcuagaauguaucauacaa

SEQ ID NO: 5610 - RNA, 19 nt, Artificial Sequence
  source: /note="Description of Artificial Sequence: Synthetic oligonucleotide"
  source: /note="Antisense strand to SEQ ID NO: 5609"
uuguaugauacauucuagc

SEQ ID NO: 5611 - RNA, 19 nt, Artificial Sequence
  source: /note="Description of Artificial Sequence: Synthetic oligonucleotide"
  source: /note="Sense strand starting at position 2058 of SEQ ID NO: 364"
aacaauagcguucgugaaa

SEQ ID NO: 5612 - RNA, 19 nt, Artificial Sequence
  source: /note="Description of Artificial Sequence: Synthetic oligonucleotide"
  source: /note="Antisense strand to SEQ ID NO: 5611"
uuucacgaacgcuauuguu

SEQ ID NO: 5613 - RNA, 19 nt, Artificial Sequence
  source: /note="Description of Artificial Sequence: Synthetic oligonucleotide"
  source: /note="Sense strand starting at position 2058 of SEQ ID NO: 365"
acaauagcguucgugaaac

SEQ ID NO: 5614 - RNA, 19 nt, Artificial Sequence
  source: /note="Description of Artificial Sequence: Synthetic oligonucleotide"
  source: /note="Antisense strand to SEQ ID NO: 5613"
guuucacgaacgcuauugu

SEQ ID NO: 5615 - RNA, 19 nt, Artificial Sequence
  source: /note="Description of Artificial Sequence: Synthetic oligonucleotide"
  source: /note="Sense strand starting at position 2058 of SEQ ID NO: 367"
aauagcguucgugaaacgu

SEQ ID NO: 5616 - RNA, 19 nt, Artificial Sequence
  source: /note="Description of Artificial Sequence: Synthetic oligonucleotide"
  source: /note="Antisense strand to SEQ ID NO: 5615"
acguuucacgaacgcuauu

SEQ ID NO: 5617 - RNA, 19 nt, Artificial Sequence
  source: /note="Description of Artificial Sequence: Synthetic oligonucleotide"
  source: /note="Sense strand starting at position 2058 of SEQ ID NO: 369"
uagcguucgugaaacgugu

SEQ ID NO: 5618 - RNA, 19 nt, Artificial Sequence
  source: /note="Description of Artificial Sequence: Synthetic oligonucleotide"
  source: /note="Antisense strand to SEQ ID NO: 5617"
acacguuucacgaacgcua

SEQ ID NO: 5619 - RNA, 19 nt, Artificial Sequence
  source: /note="Description of Artificial Sequence: Synthetic oligonucleotide"
  source: /note="Sense strand starting at position 2058 of SEQ ID NO: 371"
gcguucgugaaacguguaa

SEQ ID NO: 5620 - RNA, 19 nt, Artificial Sequence
  source: /note="Description of Artificial Sequence: Synthetic oligonucleotide"
  source: /note="Antisense strand to SEQ ID NO: 5619"
uuacacguuucacgaacgc

SEQ ID NO: 5621 - RNA, 19 nt, Artificial Sequence
  source: /note="Description of Artificial Sequence: Synthetic oligonucleotide"
  source: /note="Sense strand starting at position 2058 of SEQ ID NO: 373"
guucgugaaacguguaaua

SEQ ID NO: 5622 - RNA, 19 nt, Artificial Sequence
  source: /note="Description of Artificial Sequence: Synthetic oligonucleotide"
  source: /note="Antisense strand to SEQ ID NO: 5621"
uauuacacguuucacgaac

SEQ ID NO: 5623 - RNA, 19 nt, Artificial Sequence
  source: /note="Description of Artificial Sequence: Synthetic oligonucleotide"
  source: /note="Sense strand starting at position 2058 of SEQ ID NO: 431"
uggcaaugcgcacguuaaa

SEQ ID NO: 5624 - RNA, 19 nt, Artificial Sequence
  source: /note="Description of Artificial Sequence: Synthetic oligonucleotide"
  source: /note="Antisense strand to SEQ ID NO: 5623"
uuuaacgugcgcauugcca

SEQ ID NO: 5625 - RNA, 19 nt, Artificial Sequence
  source: /note="Description of Artificial Sequence: Synthetic oligonucleotide"
  source: /note="Sense strand starting at position 2058 of SEQ ID NO: 472"
ucugcauuguuuccucuau

SEQ ID NO: 5626 - RNA, 19 nt, Artificial Sequence
  source: /note="Description of Artificial Sequence: Synthetic oligonucleotide"
  source: /note="Antisense strand to SEQ ID NO: 5625"
auagaggaaacaaugcaga

SEQ ID NO: 5627 - RNA, 19 nt, Artificial Sequence
  source: /note="Description of Artificial Sequence: Synthetic oligonucleotide"
  source: /note="Sense strand starting at position 2058 of SEQ ID NO: 473"
cugcauuguuuccucuauu

SEQ ID NO: 5628 - RNA, 19 nt, Artificial Sequence
  source: /note="Description of Artificial Sequence: Synthetic oligonucleotide"
  source: /note="Antisense strand to SEQ ID NO: 5627"
aauagaggaaacaaugcag

SEQ ID NO: 5629 - RNA, 19 nt, Artificial Sequence
  source: /note="Description of Artificial Sequence: Synthetic oligonucleotide"
  source: /note="Sense strand starting at position 2058 of SEQ ID NO: 474"
ugcauuguuuccucuauua

SEQ ID NO: 5630 - RNA, 19 nt, Artificial Sequence
  source: /note="Description of Artificial Sequence: Synthetic oligonucleotide"
  source: /note="Antisense strand to SEQ ID NO: 5629"
uaauagaggaaacaaugca

SEQ ID NO: 5631 - RNA, 19 nt, Artificial Sequence
  source: /note="Description of Artificial Sequence: Synthetic oligonucleotide"
  source: /note="Sense strand starting at position 2058 of SEQ ID NO: 545"
ucaacuguguugcuugaaa

SEQ ID NO: 5632 - RNA, 19 nt, Artificial Sequence
  source: /note="Description of Artificial Sequence: Synthetic oligonucleotide"
  source: /note="Antisense strand to SEQ ID NO: 5631"
uuucaagcaacacaguuga

SEQ ID NO: 5633 - RNA, 19 nt, Artificial Sequence
  source: /note="Description of Artificial Sequence: Synthetic oligonucleotide"
  source: /note="Sense strand starting at position 2058 of SEQ ID NO: 547"
aacuguguugcuugaaauc

SEQ ID NO: 5634 - RNA, 19 nt, Artificial Sequence
  source: /note="Description of Artificial Sequence: Synthetic oligonucleotide"
  source: /note="Antisense strand to SEQ ID NO: 5633"
gauuucaagcaacacaguu

SEQ ID NO: 5635 - RNA, 19 nt, Artificial Sequence
  source: /note="Description of Artificial Sequence: Synthetic oligonucleotide"
  source: /note="Sense strand starting at position 2058 of SEQ ID NO: 556"
gcuugaaaucagggucucu

SEQ ID NO: 5636 - RNA, 19 nt, Artificial Sequence
  source: /note="Description of Artificial Sequence: Synthetic oligonucleotide"
  source: /note="Antisense strand to SEQ ID NO: 5635"
agagacccugauuucaagc

SEQ ID NO: 5637 - RNA, 19 nt, Artificial Sequence
  source: /note="Description of Artificial Sequence: Synthetic oligonucleotide"
  source: /note="Sense strand starting at position 2058 of SEQ ID NO: 567"
gggucucuuuacuaaauca

SEQ ID NO: 5638 - RNA, 19 nt, Artificial Sequence
  source: /note="Description of Artificial Sequence: Synthetic oligonucleotide"
  source: /note="Antisense strand to SEQ ID NO: 5637"
ugauuuaguaaagagaccc

SEQ ID NO: 5639 - RNA, 19 nt, Artificial Sequence
  source: /note="Description of Artificial Sequence: Synthetic oligonucleotide"
  source: /note="Sense strand starting at position 2058 of SEQ ID NO: 698"
ucuaguaccugggacuaaa

SEQ ID NO: 5640 - RNA, 19 nt, Artificial Sequence
  source: /note="Description of Artificial Sequence: Synthetic oligonucleotide"
  source: /note="Antisense strand to SEQ ID NO: 5639"
uuuagucccagguacuaga

SEQ ID NO: 5641 - RNA, 19 nt, Artificial Sequence
  source: /note="Description of Artificial Sequence: Synthetic oligonucleotide"
  source: /note="Sense strand starting at position 2058 of SEQ ID NO: 835"
gugcuaggauuacacgaaa

SEQ ID NO: 5642 - RNA, 19 nt, Artificial Sequence
  source: /note="Description of Artificial Sequence: Synthetic oligonucleotide"
  source: /note="Antisense strand to SEQ ID NO: 5641"
uuucguguaauccuagcac

SEQ ID NO: 5643 - RNA, 19 nt, Artificial Sequence
  source: /note="Description of Artificial Sequence: Synthetic oligonucleotide"
  source: /note="Sense strand starting at position 2058 of SEQ ID NO: 1282"
uuaugcuagaaguguuaag

SEQ ID NO: 5644 - RNA, 19 nt, Artificial Sequence
  source: /note="Description of Artificial Sequence: Synthetic oligonucleotide"
  source: /note="Antisense strand to SEQ ID NO: 5643"
cuuaacacuucuagcauaa

SEQ ID NO: 5645 - RNA, 19 nt, Artificial Sequence
  source: /note="Description of Artificial Sequence: Synthetic oligonucleotide"
  source: /note="Sense strand starting at position 2058 of SEQ ID NO: 1291"
aaguguuaaguuugugucu

SEQ ID NO: 5646 - RNA, 19 nt, Artificial Sequence
  source: /note="Description of Artificial Sequence: Synthetic oligonucleotide"
  source: /note="Antisense strand to SEQ ID NO: 5645"
agacacaaacuuaacacuu

SEQ ID NO: 5647 - RNA, 19 nt, Artificial Sequence
  source: /note="Description of Artificial Sequence: Synthetic oligonucleotide"
  source: /note="Sense strand starting at position 2058 of SEQ ID NO: 1293"
guguuaaguuugugucuca

SEQ ID NO: 5648 - RNA, 19 nt, Artificial Sequence
  source: /note="Description of Artificial Sequence: Synthetic oligonucleotide"
  source: /note="Antisense strand to SEQ ID NO: 5647"
ugagacacaaacuuaacac

SEQ ID NO: 5649 - RNA, 19 nt, Artificial Sequence
  source: /note="Description of Artificial Sequence: Synthetic oligonucleotide"
  source: /note="Sense strand starting at position 2058 of SEQ ID NO: 1294"
uguuaaguuugugucucaa

SEQ ID NO: 5650 - RNA, 19 nt, Artificial Sequence
  source: /note="Description of Artificial Sequence: Synthetic oligonucleotide"
  source: /note="Antisense strand to SEQ ID NO: 5649"
uugagacacaaacuuaaca

SEQ ID NO: 5651 - RNA, 19 nt, Artificial Sequence
  source: /note="Description of Artificial Sequence: Synthetic oligonucleotide"
  source: /note="Sense strand starting at position 2058 of SEQ ID NO: 1296"
uuaaguuugugucucaaua

SEQ ID NO: 5652 - RNA, 19 nt, Artificial Sequence
  source: /note="Description of Artificial Sequence: Synthetic oligonucleotide"
  source: /note="Antisense strand to SEQ ID NO: 5651"
uauugagacacaaacuuaa

SEQ ID NO: 5653 - RNA, 19 nt, Artificial Sequence
  source: /note="Description of Artificial Sequence: Synthetic oligonucleotide"
  source: /note="Sense strand starting at position 2058 of SEQ ID NO: 1334"
gcauguuuagcccaaacac

SEQ ID NO: 5654 - RNA, 19 nt, Artificial Sequence
  source: /note="Description of Artificial Sequence: Synthetic oligonucleotide"
  source: /note="Antisense strand to SEQ ID NO: 5653"
guguuugggcuaaacaugc

SEQ ID NO: 5655 - RNA, 19 nt, Artificial Sequence
  source: /note="Description of Artificial Sequence: Synthetic oligonucleotide"
  source: /note="Sense strand starting at position 2058 of SEQ ID NO: 1365"
agagcaagauuagaauaaa

SEQ ID NO: 5656 - RNA, 19 nt, Artificial Sequence
  source: /note="Description of Artificial Sequence: Synthetic oligonucleotide"
  source: /note="Antisense strand to SEQ ID NO: 5655"
uuuauucuaaucuugcucu

SEQ ID NO: 5657 - RNA, 19 nt, Artificial Sequence
  source: /note="Description of Artificial Sequence: Synthetic oligonucleotide"
  source: /note="Sense strand starting at position 2058 of SEQ ID NO: 1464"
acagccacguucuuuaaau

SEQ ID NO: 5658 - RNA, 19 nt, Artificial Sequence
  source: /note="Description of Artificial Sequence: Synthetic oligonucleotide"
  source: /note="Antisense strand to SEQ ID NO: 5657"
auuuaaagaacguggcugu

SEQ ID NO: 5659 - RNA, 19 nt, Artificial Sequence
  source: /note="Description of Artificial Sequence: Synthetic oligonucleotide"
  source: /note="Sense strand starting at position 2058 of SEQ ID NO: 1483"
uuugcaagcugugacuaua

SEQ ID NO: 5660 - RNA, 19 nt, Artificial Sequence
  source: /note="Description of Artificial Sequence: Synthetic oligonucleotide"
  source: /note="Antisense strand to SEQ ID NO: 5659"
uauagucacagcuugcaaa

SEQ ID NO: 5661 - RNA, 19 nt, Artificial Sequence
  source: /note="Description of Artificial Sequence: Synthetic oligonucleotide"
  source: /note="Sense strand starting at position 2058 of SEQ ID NO: 2812"
gccggaacagcucaaguuu

SEQ ID NO: 5662 - RNA, 19 nt, Artificial Sequence
  source: /note="Description of Artificial Sequence: Synthetic oligonucleotide"
  source: /note="Antisense strand to SEQ ID NO: 5661"
aaacuugagcuguuccggc

SEQ ID NO: 5663 - RNA, 19 nt, Artificial Sequence
  source: /note="Description of Artificial Sequence: Synthetic oligonucleotide"
  source: /note="Sense strand starting at position 2058 of SEQ ID NO: 2829"
uuugguccgcccugggaau

SEQ ID NO: 5664 - RNA, 19 nt, Artificial Sequence
  source: /note="Description of Artificial Sequence: Synthetic oligonucleotide"
  source: /note="Antisense strand to SEQ ID NO: 5663"
auucccagggcggaccaaa

SEQ ID NO: 5665 - RNA, 19 nt, Artificial Sequence
  source: /note="Description of Artificial Sequence: Synthetic oligonucleotide"
  source: /note="Sense strand starting at position 2058 of SEQ ID NO: 2850"
ccacgucuuccugaagugu

SEQ ID NO: 5666 - RNA, 19 nt, Artificial Sequence
  source: /note="Description of Artificial Sequence: Synthetic oligonucleotide"
  source: /note="Antisense strand to SEQ ID NO: 5665"
acacuucaggaagacgugg

SEQ ID NO: 5667 - RNA, 19 nt, Artificial Sequence
  source: /note="Description of Artificial Sequence: Synthetic oligonucleotide"
  source: /note="Sense strand starting at position 2058 of SEQ ID NO: 2878"
cugccuuagccuugucuau

SEQ ID NO: 5668 - RNA, 19 nt, Artificial Sequence
  source: /note="Description of Artificial Sequence: Synthetic oligonucleotide"
  source: /note="Antisense strand to SEQ ID NO: 5667"
auagacaaggcuaaggcag

SEQ ID NO: 5669 - RNA, 19 nt, Artificial Sequence
  source: /note="Description of Artificial Sequence: Synthetic oligonucleotide"
  source: /note="Sense strand starting at position 2058 of SEQ ID NO: 2880"
gccuuagccuugucuauau

SEQ ID NO: 5670 - RNA, 19 nt, Artificial Sequence
  source: /note="Description of Artificial Sequence: Synthetic oligonucleotide"
  source: /note="Antisense strand to SEQ ID NO: 5669"
auauagacaaggcuaaggc

SEQ ID NO: 5671 - RNA, 19 nt, Artificial Sequence
  source: /note="Description of Artificial Sequence: Synthetic oligonucleotide"
  source: /note="Sense strand starting at position 2058 of SEQ ID NO: 2895"
auauuuagcuaaggguuaa

SEQ ID NO: 5672 - RNA, 19 nt, Artificial Sequence
  source: /note="Description of Artificial Sequence: Synthetic oligonucleotide"
  source: /note="Antisense strand to SEQ ID NO: 5671"
uuaacccuuagcuaaauau

SEQ ID NO: 5673 - RNA, 19 nt, Artificial Sequence
  source: /note="Description of Artificial Sequence: Synthetic oligonucleotide"
  source: /note="Sense strand starting at position 2058 of SEQ ID NO: 2955"
guuggauagucguucuguu

SEQ ID NO: 5674 - RNA, 19 nt, Artificial Sequence
  source: /note="Description of Artificial Sequence: Synthetic oligonucleotide"
  source: /note="Antisense strand to SEQ ID NO: 5673"
aacagaacgacuauccaac

SEQ ID NO: 5675 - RNA, 19 nt, Artificial Sequence
  source: /note="Description of Artificial Sequence: Synthetic oligonucleotide"
  source: /note="Sense strand starting at position 2058 of SEQ ID NO: 2976"
guuaauaaguaggaagaga

SEQ ID NO: 5676 - RNA, 19 nt, Artificial Sequence
  source: /note="Description of Artificial Sequence: Synthetic oligonucleotide"
  source: /note="Antisense strand to SEQ ID NO: 5675"
ucucuuccuacuuauuaac

SEQ ID NO: 5677 - RNA, 19 nt, Artificial Sequence
  source: /note="Description of Artificial Sequence: Synthetic oligonucleotide"
  source: /note="Sense strand starting at position 2058 of SEQ ID NO: 3114"
ucacuuguagggugguaua

SEQ ID NO: 5678 - RNA, 19 nt, Artificial Sequence
  source: /note="Description of Artificial Sequence: Synthetic oligonucleotide"
  source: /note="Antisense strand to SEQ ID NO: 5677"
uauaccacccuacaaguga

SEQ ID NO: 5679 - RNA, 19 nt, Artificial Sequence
  source: /note="Description of Artificial Sequence: Synthetic oligonucleotide"
  source: /note="Sense strand starting at position 2058 of SEQ ID NO: 3117"
cuuguagggugguauacau

SEQ ID NO: 5680 - RNA, 19 nt, Artificial Sequence
  source: /note="Description of Artificial Sequence: Synthetic oligonucleotide"
  source: /note="Antisense strand to SEQ ID NO: 5679"
auguauaccacccuacaag

SEQ ID NO: 5681 - RNA, 19 nt, Artificial Sequence
  source: /note="Description of Artificial Sequence: Synthetic oligonucleotide"
  source: /note="Sense strand starting at position 2058 of SEQ ID NO: 3226"
gcuucaaacgugugugaau

SEQ ID NO: 5682 - RNA, 19 nt, Artificial Sequence
  source: /note="Description of Artificial Sequence: Synthetic oligonucleotide"
  source: /note="Antisense strand to SEQ ID NO: 5681"
auucacacacguuugaagc

SEQ ID NO: 5683 - RNA, 19 nt, Artificial Sequence
  source: /note="Description of Artificial Sequence: Synthetic oligonucleotide"
  source: /note="Sense strand starting at position 2058 of SEQ ID NO: 3280"
auggguuuguugggucagu

SEQ ID NO: 5684 - RNA, 19 nt, Artificial Sequence
  source: /note="Description of Artificial Sequence: Synthetic oligonucleotide"
  source: /note="Antisense strand to SEQ ID NO: 5683"
acugacccaacaaacccau

SEQ ID NO: 5685 - RNA, 19 nt, Artificial Sequence
  source: /note="Description of Artificial Sequence: Synthetic oligonucleotide"
  source: /note="Sense strand starting at position 2058 of SEQ ID NO: 3281"
uggguuuguugggucagua

SEQ ID NO: 5686 - RNA, 19 nt, Artificial Sequence
  source: /note="Description of Artificial Sequence: Synthetic oligonucleotide"
  source: /note="Antisense strand to SEQ ID NO: 5685"
uacugacccaacaaaccca

SEQ ID NO: 5687 - RNA, 19 nt, Artificial Sequence
  source: /note="Description of Artificial Sequence: Synthetic oligonucleotide"
  source: /note="Sense strand starting at position 2058 of SEQ ID NO: 3336"
acaucugcccuugguuaaa

SEQ ID NO: 5688 - RNA, 19 nt, Artificial Sequence
  source: /note="Description of Artificial Sequence: Synthetic oligonucleotide"
  source: /note="Antisense strand to SEQ ID NO: 5687"
uuuaaccaagggcagaugu

SEQ ID NO: 5689 - RNA, 19 nt, Artificial Sequence
  source: /note="Description of Artificial Sequence: Synthetic oligonucleotide"
  source: /note="Sense strand starting at position 2058 of SEQ ID NO: 3367"
uccuuucuagcgugagcua

SEQ ID NO: 5690 - RNA, 19 nt, Artificial Sequence
  source: /note="Description of Artificial Sequence: Synthetic oligonucleotide"
  source: /note="Antisense strand to SEQ ID NO: 5689"
uagcucacgcuagaaagga

SEQ ID NO: 5691 - RNA, 19 nt, Artificial Sequence
  source: /note="Description of Artificial Sequence: Synthetic oligonucleotide"
  source: /note="Sense strand starting at position 2058 of SEQ ID NO: 3368"
ccuuucuagcgugagcuau

SEQ ID NO: 5692 - RNA, 19 nt, Artificial Sequence
  source: /note="Description of Artificial Sequence: Synthetic oligonucleotide"
  source: /note="Antisense strand to SEQ ID NO: 5691"
auagcucacgcuagaaagg

SEQ ID NO: 5693 - RNA, 19 nt, Artificial Sequence
  source: /note="Description of Artificial Sequence: Synthetic oligonucleotide"
  source: /note="Sense strand starting at position 2058 of SEQ ID NO: 3376"
gcgugagcuaucuagccgu

SEQ ID NO: 5694 - RNA, 19 nt, Artificial Sequence
  source: /note="Description of Artificial Sequence: Synthetic oligonucleotide"
  source: /note="Antisense strand to SEQ ID NO: 5693"
acggcuagauagcucacgc

SEQ ID NO: 5695 - RNA, 19 nt, Artificial Sequence
  source: /note="Description of Artificial Sequence: Synthetic oligonucleotide"
  source: /note="Sense strand starting at position 2058 of SEQ ID NO: 3386"
ucuagccguuucuaaacuu

SEQ ID NO: 5696 - RNA, 19 nt, Artificial Sequence
  source: /note="Description of Artificial Sequence: Synthetic oligonucleotide"
  source: /note="Antisense strand to SEQ ID NO: 5695"
aaguuuagaaacggcuaga

SEQ ID NO: 5697 - RNA, 19 nt, Artificial Sequence
  source: /note="Description of Artificial Sequence: Synthetic oligonucleotide"
  source: /note="Sense strand starting at position 2058 of SEQ ID NO: 3416"
ugucuuaaaugguaauaag

SEQ ID NO: 5698 - RNA, 19 nt, Artificial Sequence
  source: /note="Description of Artificial Sequence: Synthetic oligonucleotide"
  source: /note="Antisense strand to SEQ ID NO: 5697"
cuuauuaccauuuaagaca

SEQ ID NO: 5699 - RNA, 19 nt, Artificial Sequence
  source: /note="Description of Artificial Sequence: Synthetic oligonucleotide"
  source: /note="Sense strand starting at position 2058 of SEQ ID NO: 3612"
gccaguguuuguuauggca

SEQ ID NO: 5700 - RNA, 19 nt, Artificial Sequence
  source: /note="Description of Artificial Sequence: Synthetic oligonucleotide"
  source: /note="Antisense strand to SEQ ID NO: 5699"
ugccauaacaaacacuggc

SEQ ID NO: 5701 - RNA, 19 nt, Artificial Sequence
  source: /note="Description of Artificial Sequence: Synthetic oligonucleotide"
  source: /note="Sense strand starting at position 2058 of SEQ ID NO: 3614"
caguguuuguuauggcauc

SEQ ID NO: 5702 - RNA, 19 nt, Artificial Sequence
  source: /note="Description of Artificial Sequence: Synthetic oligonucleotide"
  source: /note="Antisense strand to SEQ ID NO: 5701"
gaugccauaacaaacacug

SEQ ID NO: 5703 - RNA, 19 nt, Artificial Sequence
  source: /note="Description of Artificial Sequence: Synthetic oligonucleotide"
  source: /note="Sense strand starting at position 2058 of SEQ ID NO: 3646"
gcguuucuaucuguuuaaa

SEQ ID NO: 5704 - RNA, 19 nt, Artificial Sequence
  source: /note="Description of Artificial Sequence: Synthetic oligonucleotide"
  source: /note="Antisense strand to SEQ ID NO: 5703"
uuuaaacagauagaaacgc

SEQ ID NO: 5705 - RNA, 19 nt, Artificial Sequence
  source: /note="Description of Artificial Sequence: Synthetic oligonucleotide"
  source: /note="Sense strand starting at position 2058 of SEQ ID NO: 3648"
guuucuaucuguuuaaagg

SEQ ID NO: 5706 - RNA, 19 nt, Artificial Sequence
  source: /note="Description of Artificial Sequence: Synthetic oligonucleotide"
  source: /note="Antisense strand to SEQ ID NO: 5705"
ccuuuaaacagauagaaac

SEQ ID NO: 5707 - RNA, 19 nt, Artificial Sequence
  source: /note="Description of Artificial Sequence: Synthetic oligonucleotide"
  source: /note="Sense strand starting at position 2058 of SEQ ID NO: 3663"
aaggaccucuacgaguuua

SEQ ID NO: 5708 - RNA, 19 nt, Artificial Sequence
  source: /note="Description of Artificial Sequence: Synthetic oligonucleotide"
  source: /note="Antisense strand to SEQ ID NO: 5707"
uaaacucguagagguccuu

SEQ ID NO: 5709 - RNA, 19 nt, Artificial Sequence
  source: /note="Description of Artificial Sequence: Synthetic oligonucleotide"
  source: /note="Sense strand starting at position 2058 of SEQ ID NO: 3725"
gcaucaauuaccugcguga

SEQ ID NO: 5710 - RNA, 19 nt, Artificial Sequence
  source: /note="Description of Artificial Sequence: Synthetic oligonucleotide"
  source: /note="Antisense strand to SEQ ID NO: 5709"
ucacgcagguaauugaugc

SEQ ID NO: 5711 - RNA, 19 nt, Artificial Sequence
  source: /note="Description of Artificial Sequence: Synthetic oligonucleotide"
  source: /note="Sense strand starting at position 2058 of SEQ ID NO: 3727"
aucaauuaccugcgugacu

SEQ ID NO: 5712 - RNA, 19 nt, Artificial Sequence
  source: /note="Description of Artificial Sequence: Synthetic oligonucleotide"
  source: /note="Antisense strand to SEQ ID NO: 5711"
agucacgcagguaauugau

SEQ ID NO: 5713 - RNA, 19 nt, Artificial Sequence
  source: /note="Description of Artificial Sequence: Synthetic oligonucleotide"
  source: /note="Sense strand starting at position 2058 of SEQ ID NO: 3728"
ucaauuaccugcgugacuu

SEQ ID NO: 5714 - RNA, 19 nt, Artificial Sequence
  source: /note="Description of Artificial Sequence: Synthetic oligonucleotide"
  source: /note="Antisense strand to SEQ ID NO: 5713"
aagucacgcagguaauuga

SEQ ID NO: 5715 - RNA, 19 nt, Artificial Sequence
  source: /note="Description of Artificial Sequence: Synthetic oligonucleotide"
  source: /note="Sense strand starting at position 2058 of SEQ ID NO: 3729"
caauuaccugcgugacuuu

SEQ ID NO: 5716 - RNA, 19 nt, Artificial Sequence
  source: /note="Description of Artificial Sequence: Synthetic oligonucleotide"
  source: /note="Antisense strand to SEQ ID NO: 5715"
aaagucacgcagguaauug

SEQ ID NO: 5717 - RNA, 19 nt, Artificial Sequence
  source: /note="Description of Artificial Sequence: Synthetic oligonucleotide"
  source: /note="Sense strand starting at position 2058 of SEQ ID NO: 3799"
cuggaaauauaucgcuaag

SEQ ID NO: 5718 - RNA, 19 nt, Artificial Sequence
  source: /note="Description of Artificial Sequence: Synthetic oligonucleotide"
  source: /note="Antisense strand to SEQ ID NO: 5717"
cuuagcgauauauuuccag

SEQ ID NO: 5719 - RNA, 19 nt, Artificial Sequence
  source: /note="Description of Artificial Sequence: Synthetic oligonucleotide"
  source: /note="Sense strand starting at position 2060 of SEQ ID NO: 389"
cgcuaacuggauuagugau

SEQ ID NO: 5720 - RNA, 19 nt, Artificial Sequence
  source: /note="Description of Artificial Sequence: Synthetic oligonucleotide"
  source: /note="Antisense strand to SEQ ID NO: 5719"
aucacuaauccaguuagcg

SEQ ID NO: 5721 - RNA, 19 nt, Artificial Sequence
  source: /note="Description of Artificial Sequence: Synthetic oligonucleotide"
  source: /note="Sense strand starting at position 2060 of SEQ ID NO: 395"
cuggauuagugaugggaag

SEQ ID NO: 5722 - RNA, 19 nt, Artificial Sequence
  source: /note="Description of Artificial Sequence: Synthetic oligonucleotide"
  source: /note="Antisense strand to SEQ ID NO: 5721"
cuucccaucacuaauccag

SEQ ID NO: 5723 - RNA, 19 nt, Artificial Sequence
  source: /note="Description of Artificial Sequence: Synthetic oligonucleotide"
  source: /note="Sense strand starting at position 2060 of SEQ ID NO: 415"
gggcgaugucuugauggac

SEQ ID NO: 5724 - RNA, 19 nt, Artificial Sequence
  source: /note="Description of Artificial Sequence: Synthetic oligonucleotide"
  source: /note="Antisense strand to SEQ ID NO: 5723"
guccaucaagacaucgccc

SEQ ID NO: 5725 - RNA, 19 nt, Artificial Sequence
  source: /note="Description of Artificial Sequence: Synthetic oligonucleotide"
  source: /note="Sense strand starting at position 2060 of SEQ ID NO: 418"
cgaugucuugauggacagu

SEQ ID NO: 5726 - RNA, 19 nt, Artificial Sequence
  source: /note="Description of Artificial Sequence: Synthetic oligonucleotide"
  source: /note="Antisense strand to SEQ ID NO: 5725"
acuguccaucaagacaucg

SEQ ID NO: 5727 - RNA, 19 nt, Artificial Sequence
  source: /note="Description of Artificial Sequence: Synthetic oligonucleotide"
  source: /note="Sense strand starting at position 2060 of SEQ ID NO: 1037"
cgcccugugucccugagaa

SEQ ID NO: 5728 - RNA, 19 nt, Artificial Sequence
  source: /note="Description of Artificial Sequence: Synthetic oligonucleotide"
  source: /note="Antisense strand to SEQ ID NO: 5727"
uucucagggacacagggcg

SEQ ID NO: 5729 - RNA, 19 nt, Artificial Sequence
  source: /note="Description of Artificial Sequence: Synthetic oligonucleotide"
  source: /note="Sense strand starting at position 2060 of SEQ ID NO: 1041"
cugugucccugagaaggua

SEQ ID NO: 5730 - RNA, 19 nt, Artificial Sequence
  source: /note="Description of Artificial Sequence: Synthetic oligonucleotide"
  source: /note="Antisense strand to SEQ ID NO: 5729"
uaccuucucagggacacag

SEQ ID NO: 5731 - RNA, 19 nt, Artificial Sequence
  source: /note="Description of Artificial Sequence: Synthetic oligonucleotide"
  source: /note="Sense strand starting at position 2060 of SEQ ID NO: 1062"
uggaaaugacacugcuaca

SEQ ID NO: 5732 - RNA, 19 nt, Artificial Sequence
  source: /note="Description of Artificial Sequence: Synthetic oligonucleotide"
  source: /note="Antisense strand to SEQ ID NO: 5731"
uguagcagugucauuucca

SEQ ID NO: 5733 - RNA, 19 nt, Artificial Sequence
  source: /note="Description of Artificial Sequence: Synthetic oligonucleotide"
  source: /note="Sense strand starting at position 2060 of SEQ ID NO: 1144"
caagguucugagugcccaa

SEQ ID NO: 5734 - RNA, 19 nt, Artificial Sequence
  source: /note="Description of Artificial Sequence: Synthetic oligonucleotide"
  source: /note="Antisense strand to SEQ ID NO: 5733"
uugggcacucagaaccuug

SEQ ID NO: 5735 - RNA, 19 nt, Artificial Sequence
  source: /note="Description of Artificial Sequence: Synthetic oligonucleotide"
  source: /note="Sense strand starting at position 2060 of SEQ ID NO: 1267"
cacagacuccauggugaau

SEQ ID NO: 5736 - RNA, 19 nt, Artificial Sequence
  source: /note="Description of Artificial Sequence: Synthetic oligonucleotide"
  source: /note="Antisense strand to SEQ ID NO: 5735"
auucaccauggagucugug

SEQ ID NO: 5737 - RNA, 19 nt, Artificial Sequence
  source: /note="Description of Artificial Sequence: Synthetic oligonucleotide"
  source: /note="Sense strand starting at position 2060 of SEQ ID NO: 1273"
cuccauggugaaugaauga

SEQ ID NO: 5738 - RNA, 19 nt, Artificial Sequence
  source: /note="Description of Artificial Sequence: Synthetic oligonucleotide"
  source: /note="Antisense strand to SEQ ID NO: 5737"
ucauucauucaccauggag

SEQ ID NO: 5739 - RNA, 19 nt, Artificial Sequence
  source: /note="Description of Artificial Sequence: Synthetic oligonucleotide"
  source: /note="Sense strand starting at position 2060 of SEQ ID NO: 1585"
ccacauuccgaucguuaag

SEQ ID NO: 5740 - RNA, 19 nt, Artificial Sequence
  source: /note="Description of Artificial Sequence: Synthetic oligonucleotide"
  source: /note="Antisense strand to SEQ ID NO: 5739"
cuuaacgaucggaaugugg

SEQ ID NO: 5741 - RNA, 19 nt, Artificial Sequence
  source: /note="Description of Artificial Sequence: Synthetic oligonucleotide"
  source: /note="Sense strand starting at position 2060 of SEQ ID NO: 1587"
acauuccgaucguuaagau

SEQ ID NO: 5742 - RNA, 19 nt, Artificial Sequence
  source: /note="Description of Artificial Sequence: Synthetic oligonucleotide"
  source: /note="Antisense strand to SEQ ID NO: 5741"
aucuuaacgaucggaaugu

SEQ ID NO: 5743 - RNA, 19 nt, Artificial Sequence
  source: /note="Description of Artificial Sequence: Synthetic oligonucleotide"
  source: /note="Sense strand starting at position 2060 of SEQ ID NO: 1588"
cauuccgaucguuaagauu

SEQ ID NO: 5744 - RNA, 19 nt, Artificial Sequence
  source: /note="Description of Artificial Sequence: Synthetic oligonucleotide"
  source: /note="Antisense strand to SEQ ID NO: 5743"
aaucuuaacgaucggaaug

SEQ ID NO: 5745 - RNA, 19 nt, Artificial Sequence
  source: /note="Description of Artificial Sequence: Synthetic oligonucleotide"
  source: /note="Sense strand starting at position 2060 of SEQ ID NO: 2105"
gccugcugugccugaugga

SEQ ID NO: 5746 - RNA, 19 nt, Artificial Sequence
  source: /note="Description of Artificial Sequence: Synthetic oligonucleotide"
  source: /note="Antisense strand to SEQ ID NO: 5745"
uccaucaggcacagcaggc

SEQ ID NO: 5747 - RNA, 19 nt, Artificial Sequence
  source: /note="Description of Artificial Sequence: Synthetic oligonucleotide"
  source: /note="Sense strand starting at position 2060 of SEQ ID NO: 2161"
aagggcucguccguggaau

SEQ ID NO: 5748 - RNA, 19 nt, Artificial Sequence
  source: /note="Description of Artificial Sequence: Synthetic oligonucleotide"
  source: /note="Antisense strand to SEQ ID NO: 5747"
auuccacggacgagcccuu

SEQ ID NO: 5749 - RNA, 19 nt, Artificial Sequence
  source: /note="Description of Artificial Sequence: Synthetic oligonucleotide"
  source: /note="Sense strand starting at position 2060 of SEQ ID NO: 2172"
cguggaaucuaauugccuu

SEQ ID NO: 5750 - RNA, 19 nt, Artificial Sequence
  source: /note="Description of Artificial Sequence: Synthetic oligonucleotide"
  source: /note="Antisense strand to SEQ ID NO: 5749"
aaggcaauuagauuccacg

SEQ ID NO: 5751 - RNA, 19 nt, Artificial Sequence
  source: /note="Description of Artificial Sequence: Synthetic oligonucleotide"
  source: /note="Sense strand starting at position 2060 of SEQ ID NO: 2197"
ccagcccugucugaaucau

SEQ ID NO: 5752 - RNA, 19 nt, Artificial Sequence
  source: /note="Description of Artificial Sequence: Synthetic oligonucleotide"
  source: /note="Antisense strand to SEQ ID NO: 5751"
augauucagacagggcugg

SEQ ID NO: 5753 - RNA, 19 nt, Artificial Sequence
  source: /note="Description of Artificial Sequence: Synthetic oligonucleotide"
  source: /note="Sense strand starting at position 2060 of SEQ ID NO: 2429"
ggaggcaauuuguuugcuu

SEQ ID NO: 5754 - RNA, 19 nt, Artificial Sequence
  source: /note="Description of Artificial Sequence: Synthetic oligonucleotide"
  source: /note="Antisense strand to SEQ ID NO: 5753"
aagcaaacaaauugccucc

SEQ ID NO: 5755 - RNA, 19 nt, Artificial Sequence
  source: /note="Description of Artificial Sequence: Synthetic oligonucleotide"
  source: /note="Sense strand starting at position 2060 of SEQ ID NO: 2441"
uuugcuucuccagaagauu

SEQ ID NO: 5756 - RNA, 19 nt, Artificial Sequence
  source: /note="Description of Artificial Sequence: Synthetic oligonucleotide"
  source: /note="Antisense strand to SEQ ID NO: 5755"
aaucuucuggagaagcaaa

SEQ ID NO: 5757 - RNA, 19 nt, Artificial Sequence
  source: /note="Description of Artificial Sequence: Synthetic oligonucleotide"
  source: /note="Sense strand starting at position 2060 of SEQ ID NO: 2463"
ggccgugugucucauagac

SEQ ID NO: 5758 - RNA, 19 nt, Artificial Sequence
  source: /note="Description of Artificial Sequence: Synthetic oligonucleotide"
  source: /note="Antisense strand to SEQ ID NO: 5757"
gucuaugagacacacggcc

SEQ ID NO: 5759 - RNA, 19 nt, Artificial Sequence
  source: /note="Description of Artificial Sequence: Synthetic oligonucleotide"
  source: /note="Sense strand starting at position 2060 of SEQ ID NO: 2465"
ccgugugucucauagacgu

SEQ ID NO: 5760 - RNA, 19 nt, Artificial Sequence
  source: /note="Description of Artificial Sequence: Synthetic oligonucleotide"
  source: /note="Antisense strand to SEQ ID NO: 5759"
acgucuaugagacacacgg

SEQ ID NO: 5761 - RNA, 19 nt, Artificial Sequence
  source: /note="Description of Artificial Sequence: Synthetic oligonucleotide"
  source: /note="Sense strand starting at position 2060 of SEQ ID NO: 2469"
gugucucauagacgugguu

SEQ ID NO: 5762 - RNA, 19 nt, Artificial Sequence
  source: /note="Description of Artificial Sequence: Synthetic oligonucleotide"
  source: /note="Antisense strand to SEQ ID NO: 5761"
aaccacgucuaugagacac

SEQ ID NO: 5763 - RNA, 19 nt, Artificial Sequence
  source: /note="Description of Artificial Sequence: Synthetic oligonucleotide"
  source: /note="Sense strand starting at position 2060 of SEQ ID NO: 2478"
agacgugguuccuaggagu

SEQ ID NO: 5764 - RNA, 19 nt, Artificial Sequence
  source: /note="Description of Artificial Sequence: Synthetic oligonucleotide"
  source: /note="Antisense strand to SEQ ID NO: 5763"
acuccuaggaaccacgucu

SEQ ID NO: 5765 - RNA, 19 nt, Artificial Sequence
  source: /note="Description of Artificial Sequence: Synthetic oligonucleotide"
  source: /note="Sense strand starting at position 2060 of SEQ ID NO: 2644"
acgccacgcguuuccaaau

SEQ ID NO: 5766 - RNA, 19 nt, Artificial Sequence
  source: /note="Description of Artificial Sequence: Synthetic oligonucleotide"
  source: /note="Antisense strand to SEQ ID NO: 5765"
auuuggaaacgcguggcgu

SEQ ID NO: 5767 - RNA, 19 nt, Artificial Sequence
  source: /note="Description of Artificial Sequence: Synthetic oligonucleotide"
  source: /note="Sense strand starting at position 2060 of SEQ ID NO: 2853"
uggagagaccuuugcaguu

SEQ ID NO: 5768 - RNA, 19 nt, Artificial Sequence
  source: /note="Description of Artificial Sequence: Synthetic oligonucleotide"
  source: /note="Antisense strand to SEQ ID NO: 5767"
aacugcaaaggucucucca

SEQ ID NO: 5769 - RNA, 19 nt, Artificial Sequence
  source: /note="Description of Artificial Sequence: Synthetic oligonucleotide"
  source: /note="Sense strand starting at position 2060 of SEQ ID NO: 3144"
uugacaaugcuggacugua

SEQ ID NO: 5770 - RNA, 19 nt, Artificial Sequence
  source: /note="Description of Artificial Sequence: Synthetic oligonucleotide"
  source: /note="Antisense strand to SEQ ID NO: 5769"
uacaguccagcauugucaa

SEQ ID NO: 5771 - RNA, 19 nt, Artificial Sequence
  source: /note="Description of Artificial Sequence: Synthetic oligonucleotide"
  source: /note="Sense strand starting at position 2060 of SEQ ID NO: 3216"
cgcugucccuccuggagaa

SEQ ID NO: 5772 - RNA, 19 nt, Artificial Sequence
  source: /note="Description of Artificial Sequence: Synthetic oligonucleotide"
  source: /note="Antisense strand to SEQ ID NO: 5771"
uucuccaggagggacagcg

SEQ ID NO: 5773 - RNA, 19 nt, Artificial Sequence
  source: /note="Description of Artificial Sequence: Synthetic oligonucleotide"
  source: /note="Sense strand starting at position 2060 of SEQ ID NO: 3635"
cccgguuugcagugucauu

SEQ ID NO: 5774 - RNA, 19 nt, Artificial Sequence
  source: /note="Description of Artificial Sequence: Synthetic oligonucleotide"
  source: /note="Antisense strand to SEQ ID NO: 5773"
aaugacacugcaaaccggg

SEQ ID NO: 5775 - RNA, 19 nt, Artificial Sequence
  source: /note="Description of Artificial Sequence: Synthetic oligonucleotide"
  source: /note="Sense strand starting at position 2060 of SEQ ID NO: 3661"
caccucuuauccgggugaa

SEQ ID NO: 5776 - RNA, 19 nt, Artificial Sequence
  source: /note="Description of Artificial Sequence: Synthetic oligonucleotide"
  source: /note="Antisense strand to SEQ ID NO: 5775"
uucacccggauaagaggug

SEQ ID NO: 5777 - RNA, 19 nt, Artificial Sequence
  source: /note="Description of Artificial Sequence: Synthetic oligonucleotide"
  source: /note="Sense strand starting at position 2060 of SEQ ID NO: 3662"
accucuuauccgggugaac

SEQ ID NO: 5778 - RNA, 19 nt, Artificial Sequence
  source: /note="Description of Artificial Sequence: Synthetic oligonucleotide"
  source: /note="Antisense strand to SEQ ID NO: 5777"
guucacccggauaagaggu

SEQ ID NO: 5779 - RNA, 19 nt, Artificial Sequence
  source: /note="Description of Artificial Sequence: Synthetic oligonucleotide"
  source: /note="Sense strand starting at position 2060 of SEQ ID NO: 3664"
cucuuauccgggugaacuc

SEQ ID NO: 5780 - RNA, 19 nt, Artificial Sequence
  source: /note="Description of Artificial Sequence: Synthetic oligonucleotide"
  source: /note="Antisense strand to SEQ ID NO: 5779"
gaguucacccggauaagag

SEQ ID NO: 5781 - RNA, 19 nt, Artificial Sequence
  source: /note="Description of Artificial Sequence: Synthetic oligonucleotide"
  source: /note="Sense strand starting at position 2060 of SEQ ID NO: 3733"
gcccuuucuugccacgaua

SEQ ID NO: 5782 - RNA, 19 nt, Artificial Sequence
  source: /note="Description of Artificial Sequence: Synthetic oligonucleotide"
  source: /note="Antisense strand to SEQ ID NO: 5781"
uaucguggcaagaaagggc

SEQ ID NO: 5783 - RNA, 19 nt, Artificial Sequence
  source: /note="Description of Artificial Sequence: Synthetic oligonucleotide"
  source: /note="Sense strand starting at position 2060 of SEQ ID NO: 3735"
ccuuucuugccacgauauu

SEQ ID NO: 5784 - RNA, 19 nt, Artificial Sequence
  source: /note="Description of Artificial Sequence: Synthetic oligonucleotide"
  source: /note="Antisense strand to SEQ ID NO: 5783"
aauaucguggcaagaaagg

SEQ ID NO: 5785 - RNA, 19 nt, Artificial Sequence
  source: /note="Description of Artificial Sequence: Synthetic oligonucleotide"
  source: /note="Sense strand starting at position 2060 of SEQ ID NO: 3736"
cuuucuugccacgauauua

SEQ ID NO: 5786 - RNA, 19 nt, Artificial Sequence
  source: /note="Description of Artificial Sequence: Synthetic oligonucleotide"
  source: /note="Antisense strand to SEQ ID NO: 5785"
uaauaucguggcaagaaag

SEQ ID NO: 5787 - RNA, 19 nt, Artificial Sequence
  source: /note="Description of Artificial Sequence: Synthetic oligonucleotide"
  source: /note="Sense strand starting at position 2060 of SEQ ID NO: 3845"
ccuguccucucucggagau

SEQ ID NO: 5788 - RNA, 19 nt, Artificial Sequence
  source: /note="Description of Artificial Sequence: Synthetic oligonucleotide"
  source: /note="Antisense strand to SEQ ID NO: 5787"
aucuccgagagaggacagg

SEQ ID NO: 5789 - RNA, 19 nt, Artificial Sequence
  source: /note="Description of Artificial Sequence: Synthetic oligonucleotide"
  source: /note="Sense strand starting at position 2060 of SEQ ID NO: 3849"
uccucucucggagaugcua

SEQ ID NO: 5790 - RNA, 19 nt, Artificial Sequence
  source: /note="Description of Artificial Sequence: Synthetic oligonucleotide"
  source: /note="Antisense strand to SEQ ID NO: 5789"
uagcaucuccgagagagga

1. A synthetic isolated saRNA which up-regulates expression of a target protein, said target protein encoded by the sequence selected from the group consisting of SEQ ID NO: 1 (APOA1), SEQ ID NO: 2 (APOA1), SEQ ID NO: 3 (APOA1), SEQ ID NO: 4 (LDLR), SEQ ID NO: 5 (LDLR), SEQ ID NO: 6 (LDLR), SEQ ID NO: 13 (DMD), SEQ ID NO: 14 (DMD), SEQ ID NO: 15 (DMD), SEQ ID NO: 16 (DMD), SEQ ID NO: 17 (DMD), SEQ ID NO: 18 (DMD), SEQ ID NO: 19 (DMD), SEQ ID NO: 20 (PAX5), SEQ ID NO: 21 (SCN1A), SEQ ID NO: 22 (SCN1A), SEQ ID NO: 23 (IDUA), SEQ ID NO: 24 (FNDC5), SEQ ID NO: 25 (FNDC5), SEQ ID NO: 26 (FOXA2), SEQ ID NO: 27 (FOXA2), SEQ ID NO: 28 (FOXP3), SEQ ID NO: 29 (HNF4A), SEQ ID NO: 30 (HNF4A), SEQ ID NO: 31 (IFNG), SEQ ID NO: 32 (IL10), SEQ ID NO: 33 (IL2), SEQ ID NO: 34 (IL19), SEQ ID NO: 35 (LMX1A), SEQ ID NO: 36 (LMX1A), SEQ ID NO: 37 (METRNL), SEQ ID NO: 38 (NR4A2), SEQ ID NO: 39 (SIRTI), SEQ ID NO: 40 (TH), SEQ ID NO: 41 (EPO), SEQ ID NO: 42 (CDKNIB), SEQ ID NO: 43 (MDM2), SEQ ID NO: 44 (MDM2), SEQ ID NO: 45 (C19orf80), SEQ ID NO: 46 (F7), SEQ ID NO: 47 (F8) and SEQ ID NO: 48 (F8).

2. The saRNA of claim 1, wherein the saRNA is single-stranded and is 14-30 nucleotides in length.

3. The saRNA of claim 2, wherein the saRNA is at least 80% identical to the reverse complement of a nucleotide sequence selected from the group consisting of SEQ ID NOs: 72-90, 167-184, 257-308, 517-525, 562-576, 637-642, 667-688, 777-802, 907-913, 942-964, 1057-1061, 1090-1100, 1145-1149, 1170-1185, 1250-1268, 1345-1359, 1425-1435, 1480-1500, 1605-1611, 1640-1647, 1680-1690, 1735-1751, 1820-1833, 1890-1898, 1935-1951, and 2020-2060.

4. (canceled)

5. The saRNA of claim 2, wherein the saRNA comprises an antisense sequence selected from the group consisting of SEQ ID NO: 92, 94, 96, 98, 100, 102, 104, 106, 108, 110, 112, 114, 116, 118, 120, 122, 124, 126, 128, 130, 132, 134, 136, 138, 140, 142, 144, 146, 148, 150, 152, 154, 156, 158, 160, 162, 164, 166, 2062, 2064, 2066, 2068, 2070, 2072, 2074, 2076, 2078, 2080, 2082, 2084, 2086, 2088, 2090, 2092, 2094, 2096, 2098, 2100, 2102, 2104, 2106, 2108, 2110, 2112, 2114, 2116, 2118, 2120, 2122, 2124, 2126, 2128, 2130, 2132, 2134, 2136, 2138, 2140, 2142, 2144, 2146, 2148, 2150, 2152, 2154, 2156, 2158, 2160, 186, 188, 190, 192, 194, 196, 198, 200, 202, 204, 206, 208, 210, 212, 214, 216, 218, 220, 222, 224, 226, 228, 230, 232, 234, 236, 238, 240, 242, 244, 246, 248, 250, 252, 254, 256, 4610, 4612, 4614, 4616, 4618, 4620, 4622, 4624, 4626, 4628, 4630, 4632, 4634, 4636, 4638, 4640, 4642, 4644, 4646, 4648, 4650, 4652, 4654, 4656, 4658, 4660, 4662, 4664, 4666, 4668, 4670, 4672, 4674, 4676, 4678, 4680, 4682, 4684, 4686, 4688, 4690, 4692, 4694, 4696, 4698, 4700, 4702, 4704, 4706, 4708, 310, 312, 314, 316, 318, 320, 322, 324, 326, 328, 330, 332, 334, 336, 338, 340, 342, 344, 346, 348, 350, 352, 354, 356, 358, 360, 362, 364, 366, 368, 370, 372, 374, 376, 378, 380, 382, 384, 386, 388, 390, 392, 394, 396, 398, 400, 402, 404, 406, 408, 410, 412, 414, 416, 418, 420, 422, 424, 426, 428, 430, 432, 434, 436, 438, 440, 442, 444, 446, 448, 450, 452, 454, 456, 458, 460, 462, 464, 466, 468, 470, 472, 474, 476, 478, 480, 482, 484, 486, 488, 490, 492, 494, 496, 498, 500, 502, 504, 506, 508, 510, 512, 514, 516, 2362, 2364, 2366, 2368, 2370, 2372, 2374, 2376, 2378, 2380, 2382, 2384, 2386, 2388, 2390, 2392, 2394, 2396, 2398, 2400, 2402, 2404, 2406, 2408, 2410, 2412, 2414, 2416, 2418, 2420, 2422, 2424, 2426, 2428, 2430, 2432, 2434, 2436, 2438, 2440, 2442, 2444, 2446, 2448, 2450, 2452, 2454, 2456, 2458, 2460, 2462, 2464, 2466, 2468, 2470, 2472, 2474, 2476, 2478, 2480, 2482, 2484, 2486, 2488, 2490, 2492, 2494, 2496, 2498, 2500, 2502, 2504, 2506, 2508, 2510, 2512, 2514, 2516, 2518, 2520, 2522, 2524, 2526, 2528, 2530, 2532, 2534, 2536, 2538, 2540, 2542, 2544, 2546, 2548, 2550, 2552, 2554, 2556, 2558, 2560, 2562, 2564, 2566, 2568, 2570, 2572, 2574, 2576, 2578, 2580, 2582, 2584, 2586, 2588, 2590, 2592, 2594, 2596, 2598, 2600, 2602, 2604, 2606, 2608, 2610, 2612, 2614, 2616, 2618, 2620, 2622, 2624, 2626, 2628, 2630, 2632, 2634, 2636, 2638, 2640, 2642, 2644, 2646, 2648, 2650, 2652, 2654, 2656, 2658, 2660, 2662, 2664, 2666, 2668, 2670, 2672, 2674, 2676, 2678, 2680, 2682, 2684, 2686, 2688, 2690, 2692, 2694, 2696, 2698, 2700, 2702, 2704, 2706, 2708, 2710, 2712, 2714, 2716, 2718, 2720, 2722, 2724, 2726, 2728, 2730, 2732, 2734, 2736, 2738, 2740, 2742, 2744, 2746, 2748, 2750, 2752, 2754, 2756, 2758, 2760, 2762, 2764, 2766, 2768, 2770, 2772, 2774, 2776, 2778, 2780, 2782, 2784, 2786, 2788, 2790, 2792, 2794, 2796, 2798, 2800, 2802, 2804, 2806, 2808, 2810, 2812, 2814, 2816, 2818, 2820, 2822, 2824, 2826, 2828, 2830, 2832, 2834, 2836, 2838, 2840, 2842, 2844, 2846, 2848, 2850, 2852, 2854, 2856, 2858, 2860, 2862, 2864, 2866, 2868, 2870, 2872, 2874, 2876, 2878, 2880, 2882, 2884, 2886, 2888, 2890, 2892, 2894, 2896, 2898, 2900, 2902, 2904, 2906, 2908, 2910, 2912, 2914, 2916, 2918, 2920, 2922, 2924, 2926, 2928, 2930, 2932, 2934, 2936, 2938, 2940, 2942, 2944, 2946, 2948, 2950, 2952, 2954, 2956, 2958, 2960, 2962, 2964, 2966, 2968, 2970, 2972, 2974, 2976, 2978, 2980, 2982, 2984, 2986, 2988, 2990, 2992, 2994, 2996, 2998, 3000, 3002, 3004, 3006, 3008, 3010, 3012, 3014, 3016, 3018, 3020, 3022, 3024, 3026, 3028, 3030, 3032, 3034, 3036, 3038, 3040, 3042, 3044, 3046, 3048, 3050, 3052, 3054, 3056, 3058, 3060, 3062, 3064, 3066, 3068, 3070, 3072, 3074, 3076, 3078, 3080, 3082, 3084, 3086, 3088, 3090, 3092, 3094, 3096, 3098, 3100, 3102, 3104, 3106, 3108, 3110, 3112, 3114, 3116, 3118, 3120, 3122, 3124, 3126, 3128, 3130, 3132, 3134, 3136, 3138, 527, 529, 531, 533, 535, 537, 539, 541, 543, 545, 547, 549, 551, 553, 555, 557, 559, 561, 5216, 5218, 5220, 5222, 5224, 5226, 5228, 5230, 5232, 5234, 5236, 5238, 5240, 5242, 5244, 5246, 5248, 5250, 5252, 5254, 5256, 5258, 5260, 5262, 5264, 5266, 5268, 5270, 5272, 5274, 5276, 5278, 5280, 5282, 5284, 5286, 5288, 5290, 5292, 5294, 5296, 5298, 5300, 5302, 5304, 5306, 5308, 5310, 5312, 5314, 578, 580, 582, 584, 586, 588, 590, 592, 594, 596, 598, 600, 602, 604, 606, 608, 610, 612, 614, 616, 618, 620, 622, 624, 626, 628, 630, 632, 634, 636, 5316, 5318, 5320, 5322, 5324, 5326, 5328, 5330, 5332, 5334, 5336, 5338, 5340, 5342, 5344, 5346, 5348, 5350, 5352, 5354, 5356, 5358, 5360, 5362, 5364, 5366, 5368, 5370, 5372, 5374, 5376, 5378, 5380, 5382, 5384, 5386, 5388, 5390, 5392, 5394, 5396, 5398, 5400, 5402, 5404, 5406, 5408, 5410, 5412, 5414, 5416, 5418, 5420, 5422, 5424, 5426, 5428, 5430, 5432, 5434, 5436, 5438, 5440, 5442, 5444, 5446, 5448, 5450, 5452, 5454, 5456, 5458, 5460, 5462, 5464, 5466, 5468, 5470, 5472, 5474, 5476, 5478, 5480, 5482, 5484, 5486, 5488, 5490, 5492, 5494, 5496, 5498, 5500, 5502, 5504, 5506, 5508, 5510, 5512, 5514, 5516, 5518, 644, 646, 648, 650, 652, 654, 656, 658, 660, 662, 664, 666, 4042, 4044, 4046, 4048, 4050, 4052, 4054, 4056, 4058, 4060, 4062, 4064, 4066, 4068, 4070, 4072, 4074, 4076, 4078, 4080, 4082, 4084, 4086, 4088, 4090, 4092, 4094, 4096, 4098, 4100, 4102, 4104, 4106, 4108, 690, 692, 694, 696, 698, 700, 702, 704, 706, 708, 710, 712, 714, 716, 718, 720, 722, 724, 726, 728, 730, 732, 734, 736, 738, 740, 742, 744, 746, 748, 750, 752, 754, 756, 758, 760, 762, 764, 766, 768, 770, 772, 774, 776, 3398, 3400, 3402, 3404, 3406, 3408, 3410, 3412, 3414, 3416, 3418, 3420, 3422, 3424, 3426, 3428, 3430, 3432, 3434, 3436, 3438, 3440, 3442, 3444, 3446, 3448, 3450, 3452, 3454, 3456, 3458, 3460, 3462, 3464, 3466, 3468, 3470, 3472, 3474, 3476, 3478, 3480, 3482, 3484, 3486, 3488, 3490, 3492, 3494, 3496, 3498, 3500, 3502, 3504, 3506, 3508, 3510, 3512, 3514, 3516, 3518, 3520, 3522, 3524, 3526, 3528, 3530, 3532, 3534, 3536, 3538, 3540, 3542, 3544, 3546, 3548, 3550, 3552, 3554, 3556, 3558, 3560, 3562, 3564, 3566, 3568, 3570, 3572, 3574, 3576, 3578, 3580, 3582, 3584, 3586, 3588, 3590, 3592, 3594, 3596, 3598, 804, 806, 808, 810, 812, 814, 816, 818, 820, 822, 824, 826, 828, 830, 832, 834, 836, 838, 840, 842, 844, 846, 848, 850, 852, 854, 856, 858, 860, 862, 864, 866, 868, 870, 872, 874, 876, 878, 880, 882, 884, 886, 888, 890, 892, 894, 896, 898, 900, 902, 904, 3600, 3602, 3604, 3606, 3608, 3610, 3612, 3614, 3616, 3618, 3620, 3622, 3624, 3626, 3628, 3630, 3632, 3634, 3636, 3638, 3640, 3642, 3644, 3646, 3648, 3650, 3652, 3654, 3656, 3658, 3660, 3662, 3664, 3666, 3668, 3670, 3672, 3674, 3676, 3678, 3680, 3682, 3684, 3686, 3688, 3690, 3692, 3694, 3696, 3698, 3700, 3702, 3704, 3706, 3708, 3710, 3712, 3714, 3716, 3718, 3720, 3722, 3724, 3726, 3728, 3730, 3732, 3734, 3736, 3738, 3740, 3742, 3744, 3746, 3748, 3750, 3752, 3754, 3756, 3758, 3760, 915, 917, 919, 921, 923, 925, 927, 929, 931, 933, 935, 937, 939, 941, 3762, 3764, 3766, 3768, 3770, 3772, 3774, 3776, 3778, 3780, 3782, 3784, 3786, 3788, 3790, 3792, 3794, 3796, 3798, 3800, 3802, 3804, 3806, 3808, 3810, 3812, 3814, 3816, 3818, 3820, 3822, 3824, 3826, 3828, 3830, 3832, 3834, 3836, 3838, 3840, 3842, 966, 968, 970, 972, 974, 976, 978, 980, 982, 984, 986, 988, 990, 992, 994, 996, 998, 1000, 1002, 1004, 1006, 1008, 1010, 1012, 1014, 1016, 1018, 1020, 1022, 1024, 1026, 1028, 1030, 1032, 1034, 1036, 1038, 1040, 1042, 1044, 1046, 1048, 1050, 1052, 1054, 1056, 3844, 3846, 3848, 3850, 3852, 3854, 3856, 3858, 3860, 3862, 3864, 3866, 3868, 3870, 3872, 3874, 3876, 3878, 3880, 3882, 3884, 3886, 3888, 3890, 3892, 3894, 3896, 3898, 3900, 3902, 3904, 3906, 3908, 3910, 3912, 3914, 3916, 3918, 3920, 3922, 3924, 3926, 3928, 3930, 3932, 3934, 3936, 3938, 3940, 3942, 3944, 3946, 3948, 3950, 3952, 3954, 3956, 3958, 3960, 3962, 3964, 3966, 3968, 3970, 3972, 3974, 3976, 3978, 3980, 3982, 3984, 3986, 3988, 3990, 3992, 3994, 3996, 3998, 4000, 4002, 4004, 4006, 4008, 4010, 4012, 4014, 4016, 4018, 4020, 4022, 4024, 4026, 4028, 4030, 4032, 4034, 4036, 4038, 4040, 1071, 1073, 1075, 1077, 1079, 1081, 1083, 1085, 1087, 1089, 4110, 4112, 4114, 4116, 4118, 4120, 4122, 4124, 4126, 4128, 4130, 4132, 4134, 4136, 4138, 4140, 4142, 4144, 4146, 4148, 4150, 4152, 4154, 4156, 4158, 4160, 4162, 4164, 4166, 4168, 4170, 4172, 4174, 4176, 4178, 4180, 4182, 4184, 4186, 4188, 4190, 4192, 4194, 4196, 4198, 4200, 4202, 4204, 4206, 4208, 1102, 1104, 1106, 1108, 1110, 1112, 1114, 1116, 1118, 1120, 1122, 1124, 1126, 1128, 1130, 1132, 1134, 1136, 1138, 1140, 1142, 1144, 4210, 4212, 4214, 4216, 4218, 4220, 4222, 4224, 4226, 4228, 4230, 4232, 4234, 4236, 4238, 4240, 4242, 4244, 4246, 4248, 4250, 4252, 4254, 4256, 4258, 4260, 4262, 4264, 4266, 4268, 4270, 4272, 4274, 4276, 4278, 4280, 4282, 4284, 4286, 4288, 4290, 4292, 4294, 4296, 4298, 4300, 4302, 4304, 4306, 4308, 1151, 1153, 1155, 1157, 1159, 1161, 1163, 1165, 1167, 1169, 4510, 4512, 4514, 4516, 4518, 4520, 4522, 4524, 4526, 4528, 4530, 4532, 4534, 4536, 4538, 4540, 4542, 4544, 4546, 4548, 4550, 4552, 4554, 4556, 4558, 4560, 4562, 4564, 4566, 4568, 4570, 4572, 4574, 4576, 4578, 4580, 4582, 4584, 4586, 4588, 4590, 4592, 4594, 4596, 4598, 4600, 4602, 4604, 4606, 4608, 1187, 1189, 1191, 1193, 1195, 1197, 1199, 1201, 1203, 1205, 1207, 1209, 1211, 1213, 1215, 1217, 1219, 1221, 1223, 1225, 1227, 1229, 1231, 1233, 1235, 1237, 1239, 1241, 1243, 1245, 1247, 1249, 4310, 4312, 4314, 4316, 4318, 4320, 4322, 4324, 4326, 4328, 4330, 4332, 4334, 4336, 4338, 4340, 4342, 4344, 4346, 4348, 4350, 4352, 4354, 4356, 4358, 4360, 4362, 4364, 4366, 4368, 4370, 4372, 4374, 4376, 4378, 4380, 4382, 4384, 4386, 4388, 4390, 4392, 4394, 4396, 4398, 4400, 4402, 4404, 4406, 4408, 4410, 4412, 4414, 4416, 4418, 4420, 4422, 4424, 4426, 4428, 4430, 4432, 4434, 4436, 4438, 4440, 4442, 4444, 4446, 4448, 4450, 4452, 4454, 4456, 4458, 4460, 4462, 4464, 4466, 4468, 4470, 4472, 4474, 4476, 4478, 4480, 4482, 4484, 4486, 4488, 4490, 4492, 4494, 4496, 4498, 4500, 4502, 4504, 4506, 4508, 1270, 1272, 1274, 1276, 1278, 1280, 1282, 1284, 1286, 1288, 1290, 1292, 1294, 1296, 1298, 1300, 1302, 1304, 1306, 1308, 1310, 1312, 1314, 1316, 1318, 1320, 1322, 1324, 1326, 1328, 1330, 1332, 1334, 1336, 1338, 1340, 1342, 1344, 4710, 4712, 4714, 4716, 4718, 4720, 4722, 4724, 4726, 4728, 4730, 4732, 4734, 4736, 4738, 4740, 4742, 4744, 4746, 4748, 4750, 4752, 4754, 4756, 4758, 4760, 4762, 4764, 4766, 4768, 4770, 4772, 4774, 4776, 4778, 4780, 4782, 4784, 4786, 4788, 4790, 4792, 4794, 4796, 4798, 4800, 4802, 4804, 4806, 4808, 4810, 4812, 4814, 4816, 4818, 4820, 4822, 4824, 4826, 4828, 4830, 4832, 4834, 4836, 4838, 4840, 4842, 4844, 4846, 4848, 4850, 4852, 4854, 4856, 4858, 4860, 4862, 4864, 4866, 4868, 4870, 4872, 4874, 4876, 4878, 4880, 4882, 4884, 4886, 4888, 4890, 4892, 4894, 4896, 4898, 4900, 4902, 4904, 4906, 4908, 1362, 1364, 1366, 1368, 1370, 1372, 1374, 1376, 1378, 1380, 1382, 1384, 1386, 1388, 1390, 1394, 1396, 1398, 1400, 1402, 1404, 1406, 1408, 1410, 1412, 1414, 1416, 1418, 1420, 1422, 5076, 5078, 5080, 5082, 5084, 5086, 5088, 5090, 5092, 5094, 5096, 5098, 5100, 5102, 5104, 5106, 5108, 5110, 5112, 5114, 1437, 1439, 1441, 1443, 1445, 1447, 1449, 1451, 1453, 1455, 1457, 1459, 1461, 1463, 1465, 1467, 1469, 1471, 1473, 1475, 1477, 1479, 5116, 5118, 5120, 5122, 5124, 5126, 5128, 5130, 5132, 5134, 5136, 5138, 5140, 5142, 5144, 5146, 5148, 5150, 5152, 5154, 5156, 5158, 5160, 5162, 5164, 5166, 5168, 5170, 5172, 5174, 5176, 5178, 5180, 5182, 5184, 5186, 5188, 5190, 5192, 5194, 5196, 5198, 5200, 5202, 5204, 5206, 5208, 5210, 5212, 5214, 1502, 1504, 1506, 1508, 1510, 1512, 1514, 1516, 1518, 1520, 1522, 1524, 1526, 1528, 1530, 1532, 1534, 1536, 1538, 1540, 1542, 1544, 1546, 1548, 1550, 1552, 1554, 1556, 1558, 1560, 1562, 1564, 1566, 1568, 1570, 1572, 1574, 1576, 1578, 1580, 1582, 1584, 5520, 5522, 5524, 5526, 5528, 5530, 5532, 5534, 5536, 5538, 5540, 5542, 5544, 5546, 5548, 5550, 5552, 5554, 5556, 5558, 5560, 5562, 5564, 5566, 5568, 5570, 5572, 5574, 5576, 5578, 5580, 5582, 5584, 5586, 5588, 5590, 5592, 5594, 5596, 5598, 5600, 5602, 5604, 5606, 5608, 5610, 5612, 5614, 5616, 5618, 5620, 5622, 5624, 5626, 5628, 5630, 5632, 5634, 5636, 5638, 5640, 5642, 5644, 5646, 5648, 5650, 5652, 5654, 5656, 5658, 5660, 5662, 5664, 5666, 5668, 5670, 5672, 5674, 5676, 5678, 5680, 5682, 5684, 5686, 5688, 5690, 5692, 5694, 5696, 5698, 5700, 5702, 5704, 5706, 5708, 5710, 5712, 5714, 5716, 5718, 1613, 1615, 1617, 1619, 1621, 1623, 1625, 1627, 1629, 1631, 1633, 1635, 1637, 1639, 5720, 5722, 5724, 5726, 5728, 5730, 5732, 5734, 5736, 5738, 5740, 5742, 5744, 5746, 5748, 5750, 5752, 5754, 5756, 5758, 5760, 5762, 5764, 5766, 5768, 5770, 5772, 5774, 5776, 5778, 5780, 5782, 5784, 5786, 5788, 5790, 1649, 1651, 1653, 1655, 1657, 1659, 1661, 1663, 1665, 1667, 1669, 1671, 1673, 1675, 1677, 1679, 3140, 3142, 3144, 3146, 3148, 3150, 3152, 3154, 3156, 3158, 3160, 3162, 3164, 3166, 3168, 3170, 3172, 3174, 3176, 3178, 3180, 3182, 3184, 3186, 3188, 3190, 3192, 3194, 3196, 3198, 3200, 3202, 3204, 3206, 3208, 3210, 3212, 3214, 3216, 1692, 1694, 1696, 1698, 1700, 1702, 1704, 1706, 1708, 1710, 1712, 1714, 1716, 1718, 1720, 1722, 1724, 1726, 1728, 1730, 1732, 1734, 2262, 2264, 2266, 2268, 2270, 2272, 2274, 2276, 2278, 2280, 2282, 2284, 2286, 2288, 2290, 2292, 2294, 2296, 2298, 2300, 2302, 2304, 2306, 2308, 2310, 2312, 2314, 2316, 2318, 2320, 2322, 2324, 2326, 2328, 2330, 2332, 2334, 2336, 2338, 2340, 2342, 2344, 2346, 2348, 2350, 2352, 2354, 2356, 2358, 2360, 1753, 1755, 1757, 1759, 1761, 1763, 1765, 1767, 1769, 1771, 1773, 1775, 1777, 1779, 1781, 1783, 1785, 1787, 1789, 1791, 1793, 1795, 1797, 1799, 1801, 1803, 1805, 1807, 1809, 1811, 1813, 1815, 1817, 1819, 4910, 4912, 4914, 4916, 4918, 4920, 4922, 4924, 4926, 4928, 4930, 4932, 4934, 4936, 4938, 4940, 4942, 4944, 4946, 4948, 4950, 4952, 4954, 4956, 4958, 4960, 4962, 4964, 4966, 4968, 4970, 4972, 4974, 4976, 4978, 4980, 4982, 4984, 4986, 4988, 4990, 4992, 4994, 4996, 4998, 5000, 5002, 5004, 5006, 5008, 5010, 5012, 5014, 5016, 5018, 5020, 5022, 5024, 5026, 5028, 5030, 5032, 5034, 5036, 5038, 5040, 5042, 5044, 5046, 5048, 5050, 5052, 5054, 5056, 5058, 5060, 5062, 5064, 5066, 5068, 5070, 5072, 5074, 1835, 1837, 1839, 1841, 1843, 1845, 1847, 1849, 1851, 1853, 1855, 1857, 1859, 1861, 1863, 1865, 1867, 1869, 1871, 1873, 1875, 1877, 1879, 1881, 1883, 1885, 1887, 1889, 2162, 2164, 2166, 2168, 2170, 2172, 2174, 2176, 2178, 2180, 2182, 2184, 2186, 2188, 2190, 2192, 2194, 2196, 2198, 2200, 2202, 2204, 2206, 2208, 2210, 2212, 2214, 2216, 2218, 2220, 2222, 2224, 2226, 2228, 2230, 2232, 2234, 2236, 2238, 2240, 2242, 2244, 2246, 2248, 2250, 2252, 2254, 2256, 2258, 2260, 1900, 1902, 1904, 1906, 1908, 1910, 1912, 1914, 1916, 1918, 1920, 1922, 1924, 1926, 1928, 1930, 1932, 1934, 3218, 3220, 3222, 3224, 3226, 3228, 3230, 3232, 3234, 3236, 3238, 3240, 3242, 3244, 3246, 3248, 3250, 3252, 3254, 3256, 3258, 3260, 3262, 3264, 3266, 3268, 3270, 3272, 3274, 3276, 3278, 3280, 3282, 3284, 3286, 1953, 1955, 1957, 1959, 1961, 1963, 1965, 1967, 1969, 1971, 1973, 1975, 1977, 1979, 1981, 1983, 1985, 1987, 1989, 1991, 1993, 1995, 1997, 1999, 2001, 2003, 2005, 2007, 2009, 2011, 2013, 2015, 2017, 2019, 3288, 3290, 3292, 3294, 3296, 3298, 3300, 3302, 3304, 3306, 3308, 3310, 3312, 3314, 3316, 3318, 3320, 3322, 3324, 3326, 3328, 3330, 3332, 3334, 3336, 3338, 3340, 3342, 3344, 3346, 3348, 3350, 3352, 3354, 3356, 3358, 3360, 3362, 3364, 3366, 3368, 3370, 3372, 3374, 3376, 3378, 3380, 3382, 3384, 3386, 3388, 3390, 3392, 3394 and 3396.

6. The saRNA of claim 2, wherein the saRNA comprises a 3′ tail.

7. The saRNA of claim 2, wherein the saRNA comprises at least one modification.

8. The saRNA of claim 1, wherein the saRNA is an saRNA duplex comprising an antisense strand and a sense strand wherein each strand is independently 14-30 nucleotides in length.

9. The saRNA of claim 8, wherein the antisense strand of the saRNA duplex is at least 80% identical to the reverse complement of a nucleotide sequence selected from the group consisting of SEQ ID NOs: 72-90, 167-184, 257-308, 517-525, 562-576, 637-642, 667-688, 777-802, 907-913, 942-964, 1057-1061, 1090-1100, 1145-1149, 1170-1185, 1250-1268, 1345-1359, 1425-1435, 1480-1500, 1605-1611, 1640-1647, 1680-1690, 1735-1751, 1820-1833, 1890-1898, 1935-1951, and 2020-2060.

10. (canceled)

11. The saRNA of claim 8, wherein the saRNA comprises a sense sequence and an antisense sequence selected from the group of sequence pairs consisting of SEQ ID NOs: 91 and 92; 93 and 94; 95 and 96; 97 and 98; 99 and 100; 101 and 102; 103 and 104; 105 and 106; 107 and 108; 109 and 110; 111 and 112; 113 and 114; 115 and 116; 117 and 118; 119 and 120; 121 and 122; 123 and 124; 125 and 126; 127 and 128; 129 and 130; 131 and 132; 133 and 134; 135 and 136; 137 and 138; 139 and 140; 141 and 142; 143 and 144; 145 and 146; 147 and 148; 149 and 150; 151 and 152; 153 and 154; 155 and 156; 157 and 158; 159 and 160; 161 and 162; 163 and 164; 165 and 166; 2061 and 2062; 2063 and 2064; 2065 and 2066; 2067 and 2068; 2069 and 2070; 2071 and 2072; 2073 and 2074; 2075 and 2076; 2077 and 2078; 2079 and 2080; 2081 and 2082; 2083 and 2084; 2085 and 2086; 2087 and 2088; 2089 and 2090; 2091 and 2092; 2093 and 2094; 2095 and 2096; 2097 and 2098; 2099 and 2100; 2101 and 2102; 2103 and 2104; 2105 and 2106; 2107 and 2108; 2109 and 2110; 2111 and 2112; 2113 and 2114; 2115 and 2116; 2117 and 2118; 2119 and 2120; 2121 and 2122; 2123 and 2124; 2125 and 2126; 2127 and 2128; 2129 and 2130; 2131 and 2132; 2133 and 2134; 2135 and 2136; 2137 and 2138; 2139 and 2140; 2141 and 2142; 2143 and 2144; 2145 and 2146; 2147 and 2148; 2149 and 2150; 2151 and 2152; 2153 and 2154; 2155 and 2156; 2157 and 2158; 2159 and 2160; 185 and 186; 187 and 188; 189 and 190; 191 and 192; 193 and 194; 195 and 196; 197 and 198; 199 and 200; 201 and 202; 203 and 204; 205 and 206; 207 and 208; 209 and 210; 211 and 212; 213 and 214; 215 and 216; 217 and 218; 219 and 220; 221 and 222; 223 and 224; 225 and 226; 227 and 228; 229 and 230; 231 and 232; 233 and 234; 235 and 236; 237 and 238; 239 and 240; 241 and 242; 243 and 244; 245 and 246; 247 and 248; 249 and 250; 251 and 252; 253 and 254; 255 and 256; 4609 and 4610; 4611 and 4612; 4613 and 4614; 4615 and 4616; 4617 and 4618; 4619 and 4620; 4621 and 4622; 4623 and 4624; 4625 and 4626; 4627 and 4628; 4629 and 4630; 4631 and 4632; 4633 and 4634; 4635 and 4636; 4637 and 4638; 4639 and 4640; 4641 and 4642; 4643 and 4644; 4645 and 4646; 4647 and 4648; 4649 and 4650; 4651 and 4652; 4653 and 4654; 4655 and 4656; 4657 and 4658; 4659 and 4660; 4661 and 4662; 4663 and 4664; 4665 and 4666; 4667 and 4668; 4669 and 4670; 4671 and 4672; 4673 and 4674; 4675 and 4676; 4677 and 4678; 4679 and 4680; 4681 and 4682; 4683 and 4684; 4685 and 4686; 4687 and 4688; 4689 and 4690; 4691 and 4692; 4693 and 4694; 4695 and 4696; 4697 and 4698; 4699 and 4700; 4701 and 4702; 4703 and 4704; 4705 and 4706; 4707 and 4708; 309 and 310; 311 and 312; 313 and 314; 315 and 316; 317 and 318; 319 and 320; 321 and 322; 323 and 324; 325 and 326; 327 and 328; 329 and 330; 331 and 332; 333 and 334; 335 and 336; 337 and 338; 339 and 340; 341 and 342; 343 and 344; 345 and 346; 347 and 348; 349 and 350; 351 and 352; 353 and 354; 355 and 356; 357 and 358; 359 and 360; 361 and 362; 363 and 364; 365 and 366; 367 and 368; 369 and 370; 371 and 372; 373 and 374; 375 and 376; 377 and 378; 379 and 380; 381 and 382; 383 and 384; 385 and 386; 387 and 388; 389 and 390; 391 and 392; 393 and 394; 395 and 396; 397 and 398; 399 and 400; 401 and 402; 403 and 404; 405 and 406; 407 and 408; 409 and 410; 411 and 412; 413 and 414; 415 and 416; 417 and 418; 419 and 420; 421 and 422; 423 and 424; 425 and 426; 427 and 428; 429 and 430; 431 and 432; 433 and 434; 435 and 436; 437 and 438; 439 and 440; 441 and 442; 443 and 444; 445 and 446; 447 and 448; 449 and 450; 451 and 452; 453 and 454; 455 and 456; 457 and 458; 459 and 460; 461 and 462; 463 and 464; 465 and 466; 467 and 468; 469 and 470; 471 and 472; 473 and 474; 475 and 476; 477 and 478; 479 and 480; 481 and 482; 483 and 484; 485 and 486; 487 and 488; 489 and 490; 491 and 492; 493 and 494; 495 and 496; 497 and 498; 499 and 500; 501 and 502; 503 and 504; 505 and 506; 507 and 508; 509 and 510; 511 and 512; 513 and 514; 515 and 516; 2361 and 2362; 2363 and 2364; 2365 and 2366; 2367 and 2368; 2369 and 2370; 2371 and 2372; 2373 and 2374; 2375 and 2376; 2377 and 2378; 2379 and 2380; 2381 and 2382; 2383 and 2384; 2385 and 2386; 2387 and 2388; 2389 and 2390; 2391 and 2392; 2393 and 2394; 2395 and 2396; 2397 and 2398; 2399 and 2400; 2401 and 2402; 2403 and 2404; 2405 and 2406; 2407 and 2408; 2409 and 2410; 2411 and 2412; 2413 and 2414; 2415 and 2416; 2417 and 2418; 2419 and 2420; 2421 and 2422; 2423 and 2424; 2425 and 2426; 2427 and 2428; 2429 and 2430; 2431 and 2432; 2433 and 2434; 2435 and 2436; 2437 and 2438; 2439 and 2440; 2441 and 2442; 2443 and 2444; 2445 and 2446; 2447 and 2448; 2449 and 2450; 2451 and 2452; 2453 and 2454; 2455 and 2456; 2457 and 2458; 2459 and 2460; 2461 and 2462; 2463 and 2464; 2465 and 2466; 2467 and 2468; 2469 and 2470; 2471 and 2472; 2473 and 2474; 2475 and 2476; 2477 and 2478; 2479 and 2480; 2481 and 2482; 2483 and 2484; 2485 and 2486; 2487 and 2488; 2489 and 2490; 2491 and 2492; 2493 and 2494; 2495 and 2496; 2497 and 2498; 2499 and 2500; 2501 and 2502; 2503 and 2504; 2505 and 2506; 2507 and 2508; 2509 and 2510; 2511 and 2512; 2513 and 2514; 2515 and 2516; 2517 and 2518; 2519 and 2520; 2521 and 2522; 2523 and 2524; 2525 and 2526; 2527 and 2528; 2529 and 2530; 2531 and 2532; 2533 and 2534; 2535 and 2536; 2537 and 2538; 2539 and 2540; 2541 and 2542; 2543 and 2544; 2545 and 2546; 2547 and 2548; 2549 and 2550; 2551 and 2552; 2553 and 2554; 2555 and 2556; 2557 and 2558; 2559 and 2560; 2561 and 2562; 2563 and 2564; 2565 and 2566; 2567 and 2568; 2569 and 2570; 2571 and 2572; 2573 and 2574; 2575 and 2576; 2577 and 2578; 2579 and 2580; 2581 and 2582; 2583 and 2584; 2585 and 2586; 2587 and 2588; 2589 and 2590; 2591 and 2592; 2593 and 2594; 2595 and 2596; 2597 and 2598; 2599 and 2600; 2601 and 2602; 2603 and 2604; 2605 and 2606; 2607 and 2608; 2609 and 2610; 2611 and 2612; 2613 and 2614; 2615 and 2616; 2617 and 2618; 2619 and 2620; 2621 and 2622; 2623 and 2624; 2625 and 2626; 2627 and 2628; 2629 and 2630; 2631 and 2632; 2633 and 2634; 2635 and 2636; 2637 and 2638; 2639 and 2640; 2641 and 2642; 2643 and 2644; 2645 and 2646; 2647 and 2648; 2649 and 2650; 2651 and 2652; 2653 and 2654; 2655 and 2656; 2657 and 2658; 2659 and 2660; 2661 and 2662; 2663 and 2664; 2665 and 2666; 2667 and 2668; 2669 and 2670; 2671 and 2672; 2673 and 2674; 2675 and 2676; 2677 and 2678; 2679 and 2680; 2681 and 2682; 2683 and 2684; 2685 and 2686; 2687 and 2688; 2689 and 2690; 2691 and 2692; 2693 and 2694; 2695 and 2696; 2697 and 2698; 2699 and 2700; 2701 and 2702; 2703 and 2704; 2705 and 2706; 2707 and 2708; 2709 and 2710; 2711 and 2712; 2713 and 2714; 2715 and 2716; 2717 and 2718; 2719 and 2720; 2721 and 2722; 2723 and 2724; 2725 and 2726; 2727 and 2728; 2729 and 2730; 2731 and 2732; 2733 and 2734; 2735 and 2736; 2737 and 2738; 2739 and 2740; 2741 and 2742; 2743 and 2744; 2745 and 2746; 2747 and 2748; 2749 and 2750; 2751 and 2752; 2753 and 2754; 2755 and 2756; 2757 and 2758; 2759 and 2760; 2761 and 2762; 2763 and 2764; 2765 and 2766; 2767 and 2768; 2769 and 2770; 2771 and 2772; 2773 and 2774; 2775 and 2776; 2777 and 2778; 2779 and 2780; 2781 and 2782; 2783 and 2784; 2785 and 2786; 2787 and 2788; 2789 and 2790; 2791 and 2792; 2793 and 2794; 2795 and 2796; 2797 and 2798; 2799 and 2800; 2801 and 2802; 2803 and 2804; 2805 and 2806; 2807 and 2808; 2809 and 2810; 2811 and 2812; 2813 and 2814; 2815 and 2816; 2817 and 2818; 2819 and 2820; 2821 and 2822; 2823 and 2824; 2825 and 2826; 2827 and 2828; 2829 and 2830; 2831 and 2832; 2833 and 2834; 2835 and 2836; 2837 and 2838; 2839 and 2840; 2841 and 2842; 2843 and 2844; 2845 and 2846; 2847 and 2848; 2849 and 2850; 2851 and 2852; 2853 and 2854; 2855 and 2856; 2857 and 2858; 2859 and 2860; 2861 and 2862; 2863 and 2864; 2865 and 2866; 2867 and 2868; 2869 and 2870; 2871 and 2872; 2873 and 2874; 2875 and 2876; 2877 and 2878; 2879 and 2880; 2881 and 2882; 2883 and 2884; 2885 and 2886; 2887 and 2888; 2889 and 2890; 2891 and 2892; 2893 and 2894; 2895 and 2896; 2897 and 2898; 2899 and 2900; 2901 and 2902; 2903 and 2904; 2905 and 2906; 2907 and 2908; 2909 and 2910; 2911 and 2912; 2913 and 2914; 2915 and 2916; 2917 and 2918; 2919 and 2920; 2921 and 2922; 2923 and 2924; 2925 and 2926; 2927 and 2928; 2929 and 2930; 2931 and 2932; 2933 and 2934; 2935 and 2936; 2937 and 2938; 2939 and 2940; 2941 and 2942; 2943 and 2944; 2945 and 2946; 2947 and 2948; 2949 and 2950; 2951 and 2952; 2953 and 2954; 2955 and 2956; 2957 and 2958; 2959 and 2960; 2961 and 2962; 2963 and 2964; 2965 and 2966; 2967 and 2968; 2969 and 2970; 2971 and 2972; 2973 and 2974; 2975 and 2976; 2977 and 2978; 2979 and 2980; 2981 and 2982; 2983 and 2984; 2985 and 2986; 2987 and 2988; 2989 and 2990; 2991 and 2992; 2993 and 2994; 2995 and 2996; 2997 and 2998; 2999 and 3000; 3001 and 3002; 3003 and 3004; 3005 and 3006; 3007 and 3008; 3009 and 3010; 3011 and 3012; 3013 and 3014; 3015 and 3016; 3017 and 3018; 3019 and 3020; 3021 and 3022; 3023 and 3024; 3025 and 3026; 3027 and 3028; 3029 and 3030; 3031 and 3032; 3033 and 3034; 3035 and 3036; 3037 and 3038; 3039 and 3040; 3041 and 3042; 3043 and 3044; 3045 and 3046; 3047 and 3048; 3049 and 3050; 3051 and 3052; 3053 and 3054; 3055 and 3056; 3057 and 3058; 3059 and 3060; 3061 and 3062; 3063 and 3064; 3065 and 3066; 3067 and 3068; 3069 and 3070; 3071 and 3072; 3073 and 3074; 3075 and 3076; 3077 and 3078; 3079 and 3080; 3081 and 3082; 3083 and 3084; 3085 and 3086; 3087 and 3088; 3089 and 3090; 3091 and 3092; 3093 and 3094; 3095 and 3096; 3097 and 3098; 3099 and 3100; 3101 and 3102; 3103 and 3104; 3105 and 3106; 3107 and 3108; 3109 and 3110; 3111 and 3112; 3113 and 3114; 3115 and 3116; 3117 and 3118; 3119 and 3120; 3121 and 3122; 3123 and 3124; 3125 and 3126; 3127 and 3128; 3129 and 3130; 3131 and 3132; 3133 and 3134; 3135 and 3136; 3137 and 3138; 526 and 527; 528 and 529; 530 and 531; 532 and 533; 534 and 535; 536 and 537; 538 and 539; 540 and 541; 542 and 543; 544 and 545; 546 and 547; 548 and 549; 550 and 551; 552 and 553; 554 and 555; 556 and 557; 558 and 559; 560 and 561; 5215 and 5216; 5217 and 5218; 5219 and 5220; 5221 and 5222; 5223 and 5224; 5225 and 5226; 5227 and 5228; 5229 and 5230; 5231 and 5232; 5233 and 5234; 5235 and 5236; 5237 and 5238; 5239 and 5240; 5241 and 5242; 5243 and 5244; 5245 and 5246; 5247 and 5248; 5249 and 5250; 5251 and 5252; 5253 and 5254; 5255 and 5256; 5257 and 5258; 5259 and 5260; 5261 and 5262; 5263 and 5264; 5265 and 5266; 5267 and 5268; 5269 and 5270; 5271 and 5272; 5273 and 5274; 5275 and 5276; 5277 and 5278; 5279 and 5280; 5281 and 5282; 5283 and 5284; 5285 and 5286; 5287 and 5288; 5289 and 5290; 5291 and 5292; 5293 and 5294; 5295 and 5296; 5297 and 5298; 5299 and 5300; 5301 and 5302; 5303 and 5304; 5305 and 5306; 5307 and 5308; 5309 and 5310; 5311 and 5312; 5313 and 5314; 577 and 578; 579 and 580; 581 and 582; 583 and 584; 585 and 586; 587 and 588; 589 and 590; 591 and 592; 593 and 594; 595 and 596; 597 and 598; 599 and 600; 601 and 602; 603 and 604; 605 and 606; 607 and 608; 609 and 610; 611 and 612; 613 and 614; 615 and 616; 617 and 618; 619 and 620; 621 and 622; 623 and 624; 625 and 626; 627 and 628; 629 and 630; 631 and 632; 633 and 634; 635 and 636; 5315 and 5316; 5317 and 5318; 5319 and 5320; 5321 and 5322; 5323 and 5324; 5325 and 5326; 5327 and 5328; 5329 and 5330; 5331 and 5332; 5333 and 5334; 5335 and 5336; 5337 and 5338; 5339 and 5340; 5341 and 5342; 5343 and 5344; 5345 and 5346; 5347 and 5348; 5349 and 5350; 5351 and 5352; 5353 and 5354; 5355 and 5356; 5357 and 5358; 5359 and 5360; 5361 and 5362; 5363 and 5364; 5365 and 5366; 5367 and 5368; 5369 and 5370; 5371 and 5372; 5373 and 5374; 5375 and 5376; 5377 and 5378; 5379 and 5380; 5381 and 5382; 5383 and 5384; 5385 and 5386; 5387 and 5388; 5389 and 5390; 5391 and 5392; 5393 and 5394; 5395 and 5396; 5397 and 5398; 5399 and 5400; 5401 and 5402; 5403 and 5404; 5405 and 5406; 5407 and 5408; 5409 and 5410; 5411 and 5412; 5413 and 5414; 5415 and 5416; 5417 and 5418; 5419 and 5420; 5421 and 5422; 5423 and 5424; 5425 and 5426; 5427 and 5428; 5429 and 5430; 5431 and 5432; 5433 and 5434; 5435 and 5436; 5437 and 5438; 5439 and 5440; 5441 and 5442; 5443 and 5444; 5445 and 5446; 5447 and 5448; 5449 and 5450; 5451 and 5452; 5453 and 5454; 5455 and 5456; 5457 and 5458; 5459 and 5460; 5461 and 5462; 5463 and 5464; 5465 and 5466; 5467 and 5468; 5469 and 5470; 5471 and 5472; 5473 and 5474; 5475 and 5476; 5477 and 5478; 5479 and 5480; 5481 and 5482; 5483 and 5484; 5485 and 5486; 5487 and 5488; 5489 and 5490; 5491 and 5492; 5493 and 5494; 5495 and 5496; 5497 and 5498; 5499 and 5500; 5501 and 5502; 5503 and 5504; 5505 and 5506; 5507 and 5508; 5509 and 5510; 5511 and 5512; 5513 and 5514; 5515 and 5516; 5517 and 5518; 643 and 644; 645 and 646; 647 and 648; 649 and 650; 651 and 652; 653 and 654; 655 and 656; 657 and 658; 659 and 660; 661 and 662; 663 and 664; 665 and 666; 4041 and 4042; 4043 and 4044; 4045 and 4046; 4047 and 4048; 4049 and 4050; 4051 and 4052; 4053 and 4054; 4055 and 4056; 4057 and 4058; 4059 and 4060; 4061 and 4062; 4063 and 4064; 4065 and 4066; 4067 and 4068; 4069 and 4070; 4071 and 4072; 4073 and 4074; 4075 and 4076; 4077 and 4078; 4079 and 4080; 4081 and 4082; 4083 and 4084; 4085 and 4086; 4087 and 4088; 4089 and 4090; 4091 and 4092; 4093 and 4094; 4095 and 4096; 4097 and 4098; 4099 and 4100; 4101 and 4102; 4103 and 4104; 4105 and 4106; 4107 and 4108; 689 and 690; 691 and 692; 693 and 694; 695 and 696; 697 and 698; 699 and 700; 701 and 702; 703 and 704; 705 and 706; 707 and 708; 709 and 710; 711 and 712; 713 and 714; 715 and 716; 717 and 718; 719 and 720; 721 and 722; 723 and 724; 725 and 726; 727 and 728; 729 and 730; 731 and 732; 733 and 734; 735 and 736; 737 and 738; 739 and 740; 741 and 742; 743 and 744; 745 and 746; 747 and 748; 749 and 750; 751 and 752; 753 and 754; 755 and 756; 757 and 758; 759 and 760; 761 and 762; 763 and 764; 765 and 766; 767 and 768; 769 and 770; 771 and 772; 773 and 774; 775 and 776; 3397 and 3398; 3399 and 3400; 3401 and 3402; 3403 and 3404; 3405 and 3406; 3407 and 3408; 3409 and 3410; 3411 and 3412; 3413 and 3414; 3415 and 3416; 3417 and 3418; 3419 and 3420; 3421 and 3422; 3423 and 3424; 3425 and 3426; 3427 and 3428; 3429 and 3430; 3431 and 3432; 3433 and 3434; 3435 and 3436; 3437 and 3438; 3439 and 3440; 3441 and 3442; 3443 and 3444; 3445 and 3446; 3447 and 3448; 3449 and 3450; 3451 and 3452; 3453 and 3454; 3455 and 3456; 3457 and 3458; 3459 and 3460; 3461 and 3462; 3463 and 3464; 3465 and 3466; 3467 and 3468; 3469 and 3470; 3471 and 3472; 3473 and 3474; 3475 and 3476; 3477 and 3478; 3479 and 3480; 3481 and 3482; 3483 and 3484; 3485 and 3486; 3487 and 3488; 3489 and 3490; 3491 and 3492; 3493 and 3494; 3495 and 3496; 3497 and 3498; 3499 and 3500; 3501 and 3502; 3503 and 3504; 3505 and 3506; 3507 and 3508; 3509 and 3510; 3511 and 3512; 3513 and 3514; 3515 and 3516; 3517 and 3518; 3519 and 3520; 3521 and 3522; 3523 and 3524; 3525 and 3526; 3527 and 3528; 3529 and 3530; 3531 and 3532; 3533 and 3534; 3535 and 3536; 3537 and 3538; 3539 and 3540; 3541 and 3542; 3543 and 3544; 3545 and 3546; 3547 and 3548; 3549 and 3550; 3551 and 3552; 3553 and 3554; 3555 and 3556; 3557 and 3558; 3559 and 3560; 3561 and 3562; 3563 and 3564; 3565 and 3566; 3567 and 3568; 3569 and 3570; 3571 and 3572; 3573 and 3574; 3575 and 3576; 3577 and 3578; 3579 and 3580; 3581 and 3582; 3583 and 3584; 3585 and 3586; 3587 and 3588; 3589 and 3590; 3591 and 3592; 3593 and 3594; 3595 and 3596; 3597 and 3598; 803 and 804; 805 and 806; 807 and 808; 809 and 810; 811 and 812; 813 and 814; 815 and 816; 817 and 818; 819 and 820; 821 and 822; 823 and 824; 825 and 826; 827 and 828; 829 and 830; 831 and 832; 833 and 834; 835 and 836; 837 and 838; 839 and 840; 841 and 842; 843 and 844; 845 and 846; 847 and 848; 849 and 850; 851 and 852; 853 and 854; 855 and 856; 857 and 858; 859 and 860; 861 and 862; 863 and 864; 865 and 866; 867 and 868; 869 and 870; 871 and 872; 873 and 874; 875 and 876; 877 and 878; 879 and 880; 881 and 882; 883 and 884; 885 and 886; 887 and 888; 889 and 890; 891 and 892; 893 and 894; 895 and 896; 897 and 898; 899 and 900; 901 and 902; 903 and 904; 3599 and 3600; 3601 and 3602; 3603 and 3604; 3605 and 3606; 3607 and 3608; 3609 and 3610; 3611 and 3612; 3613 and 3614; 3615 and 3616; 3617 and 3618; 3619 and 3620; 3621 and 3622; 3623 and 3624; 3625 and 3626; 3627 and 3628; 3629 and 3630; 3631 and 3632; 3633 and 3634; 3635 and 3636; 3637 and 3638; 3639 and 3640; 3641 and 3642; 3643 and 3644; 3645 and 3646; 3647 and 3648; 3649 and 3650; 3651 and 3652; 3653 and 3654; 3655 and 3656; 3657 and 3658; 3659 and 3660; 3661 and 3662; 3663 and 3664; 3665 and 3666; 3667 and 3668; 3669 and 3670; 3671 and 3672; 3673 and 3674; 3675 and 3676; 3677 and 3678; 3679 and 3680; 3681 and 3682; 3683 and 3684; 3685 and 3686; 3687 and 3688; 3689 and 3690; 3691 and 3692; 3693 and 3694; 3695 and 3696; 3697 and 3698; 3699 and 3700; 3701 and 3702; 3703 and 3704; 3705 and 3706; 3707 and 3708; 3709 and 3710; 3711 and 3712; 3713 and 3714; 3715 and 3716; 3717 and 3718; 3719 and 3720; 3721 and 3722; 3723 and 3724; 3725 and 3726; 3727 and 3728; 3729 and 3730; 3731 and 3732; 3733 and 3734; 3735 and 3736; 3737 and 3738; 3739 and 3740; 3741 and 3742; 3743 and 3744; 3745 and 3746; 3747 and 3748; 3749 and 3750; 3751 and 3752; 3753 and 3754; 3755 and 3756; 3757 and 3758; 3759 and 3760; 914 and 915; SEQ ID NO: 916 and 917; SEQ ID NO: 918 and 919; SEQ ID NO: 920 and 921; SEQ ID NO: 922 and 923; SEQ ID NO: 924 and 925; SEQ ID NO: 926 and 927; SEQ ID NO: 928 and 929; SEQ ID NO: 930 and 931; SEQ ID NO: 932 and 933; SEQ ID NO: 934 and 935; SEQ ID NO: 936 and 937; SEQ ID NO: 938 and 939; SEQ ID NO: 940 and 941; SEQ ID NO: 3761 and 3762; SEQ ID NO: 3763 and 3764; SEQ ID NO: 3765 and 3766; SEQ ID NO: 3767 and 3768; SEQ ID NO: 3769 and 3770; SEQ ID NO: 3771 and 3772; SEQ ID NO: 3773 and 3774; SEQ ID NO: 3775 and 3776; SEQ ID NO: 3777 and 3778; SEQ ID NO: 3779 and 3780; SEQ ID NO: 3781 and 3782; SEQ ID NO: 3783 and 3784; SEQ ID NO: 3785 and 3786; SEQ ID NO: 3787 and 3788; SEQ ID NO: 3789 and 3790; SEQ ID NO: 3791 and 3792; SEQ ID NO: 3793 and 3794; SEQ ID NO: 3795 and 3796; SEQ ID NO: 3797 and 3798; SEQ ID NO: 3799 and 3800; SEQ ID NO: 3801 and 3802; SEQ ID NO: 3803 and 3804; SEQ ID NO: 3805 and 3806; SEQ ID NO: 3807 and 3808; SEQ ID NO: 3809 and 3810; SEQ ID NO: 3811 and 3812; SEQ ID NO: 3813 and 3814; SEQ ID NO: 3815 and 3816; SEQ ID NO: 3817 and 3818; SEQ ID NO: 3819 and 3820; SEQ ID NO: 3821 and 3822; SEQ ID NO: 3823 and 3824; SEQ ID NO: 3825 and 3826; SEQ ID NO: 3827 and 3828; SEQ ID NO: 3829 and 3830; SEQ ID NO: 3831 and 3832; SEQ ID NO: 3833 and 3834; SEQ ID NO: 3835 and 3836; SEQ ID NO: 3837 and 3838; SEQ ID NO: 3839 and 3840; SEQ ID NO: 3841 and 3842; 965 and 966; 967 and 968; 969 and 970; 971 and 972; 973 and 974; 975 and 976; 977 and 978; 979 and 980; 981 and 982; 983 and 984; 985 and 986; 987 and 988; 989 and 990; 991 and 992; 993 and 994; 995 and 996; 997 and 998; 999 and 1000; 1001 and 1002; 1003 and 1004; 1005 and 1006; 1007 and 1008; 1009 and 1010; 1011 and 1012; 1013 and 1014; 1015 and 1016; 1017 and 1018; 1019 and 1020; 1021 and 1022; 1023 and 1024; 1025 and 1026; 1027 and 1028; 1029 and 1030; 1031 and 1032; 1033 and 1034; 1035 and 1036; 1037 and 1038; 1039 and 1040; 1041 and 1042; 1043 and 1044; 1045 and 1046; 1047 and 1048; 1049 and 1050; 1051 and 1052; 1053 and 1054; 1055 and 1056; 3843 and 3844; 3845 and 3846; 3847 and 3848; 3849 and 3850; 3851 and 3852; 3853 and 3854; 3855 and 3856; 3857 and 3858; 3859 and 3860; 3861 and 3862; 3863 and 3864; 3865 and 3866; 3867 and 3868; 3869 and 3870; 3871 and 3872; 3873 and 3874; 3875 and 3876; 3877 and 3878; 3879 and 3880; 3881 and 3882; 3883 and 3884; 3885 and 3886; 3887 and 3888; 3889 and 3890; 3891 and 3892; 3893 and 3894; 3895 and 3896; 3897 and 3898; 3899 and 3900; 3901 and 3902; 3903 and 3904; 3905 and 3906; 3907 and 3908; 3909 and 3910; 3911 and 3912; 3913 and 3914; 3915 and 3916; 3917 and 3918; 3919 and 3920; 3921 and 3922; 3923 and 3924; 3925 and 3926; 3927 and 3928; 3929 and 3930; 3931 and 3932; 3933 and 3934; 3935 and 3936; 3937 and 3938; 3939 and 3940; 3941 and 3942; 3943 and 3944; 3945 and 3946; 3947 and 3948; 3949 and 3950; 3951 and 3952; 3953 and 3954; 3955 and 3956; 3957 and 3958; 3959 and 3960; 3961 and 3962; 3963 and 3964; 3965 and 3966; 3967 and 3968; 3969 and 3970; 3971 and 3972; 3973 and 3974; 3975 and 3976; 3977 and 3978; 3979 and 3980; 3981 and 3982; 3983 and 3984; 3985 and 3986; 3987 and 3988; 3989 and 3990; 3991 and 3992; 3993 and 3994; 3995 and 3996; 3997 and 3998; 3999 and 4000; 4001 and 4002; 4003 and 4004; 4005 and 4006; 4007 and 4008; 4009 and 4010; 4011 and 4012; 4013 and 4014; 4015 and 4016; 4017 and 4018; 4019 and 4020; 4021 and 4022; 4023 and 4024; 4025 and 4026; 4027 and 4028; 4029 and 4030; 4031 and 4032; 4033 and 4034; 4035 and 4036; 4037 and 4038; 4039 and 4040; 1062 and 1071; 1064 and 1073; 1066 and 1075; 1068 and 1077; 1070 and 1079; 1080 and 1081; 1082 and 1083; 1084 and 1085; 1086 and 1087; 1088 and 1089; 4109 and 4110; 4111 and 4112; 4113 and 4114; 4115 and 4116; 4117 and 4118; 4119 and 4120; 4121 and 4122; 4123 and 4124; 4125 and 4126; 4127 and 4128; 4129 and 4130; 4131 and 4132; 4133 and 4134; 4135 and 4136; 4137 and 4138; 4139 and 4140; 4141 and 4142; 4143 and 4144; 4145 and 4146; 4147 and 4148; 4149 and 4150; 4151 and 4152; 4153 and 4154; 4155 and 4156; 4157 and 4158; 4159 and 4160; 4161 and 4162; 4163 and 4164; 4165 and 4166; 4167 and 4168; 4169 and 4170; 4171 and 4172; 4173 and 4174; 4175 and 4176; 4177 and 4178; 4179 and 4180; 4181 and 4182; 4183 and 4184; 4185 and 4186; 4187 and 4188; 4189 and 4190; 4191 and 4192; 4193 and 4194; 4195 and 4196; 4197 and 4198; 4199 and 4200; 4201 and 4202; 4203 and 4204; 4205 and 4206; 4207 and 4208; 1101 and 1102; 1103 and 1104; 1105 and 1106; 1107 and 1108; 1109 and 1110; 1111 and 1112; 1113 and 1114; 1115 and 1116; 1117 and 1118; 1119 and 1120; 1121 and 1122; 1123 and 1124; 1125 and 1126; 1127 and 1128; 1129 and 1130; 1131 and 1132; 1133 and 1134; 1135 and 1136; 1137 and 1138; 1139 and 1140; 1141 and 1142; 1143 and 1144; 4209 and 4210; 4211 and 4212; 4213 and 4214; 4215 and 4216; 4217 and 4218; 4219 and 4220; 4221 and 4222; 4223 and 4224; 4225 and 4226; 4227 and 4228; 4229 and 4230; 4231 and 4232; 4233 and 4234; 4235 and 4236; 4237 and 4238; 4239 and 4240; 4241 and 4242; 4243 and 4244; 4245 and 4246; 4247 and 4248; 4249 and 4250; 4251 and 4252; 4253 and 4254; 4255 and 4256; 4257 and 4258; 4259 and 4260; 4261 and 4262; 4263 and 4264; 4265 and 4266; 4267 and 4268; 4269 and 4270; 4271 and 4272; 4273 and 4274; 4275 and 4276; 4277 and 4278; 4279 and 4280; 4281 and 4282; 4283 and 4284; 4285 and 4286; 4287 and 4288; 4289 and 4290; 4291 and 4292; 4293 and 4294; 4295 and 4296; 4297 and 4298; 4299 and 4300; 4301 and 4302; 4303 and 4304; 4305 and 4306; 4307 and 4308; 1150 and 1151; 1152 and 1153; 1154 and 1155; 1156 and 1157; 1158 and 1159; 1160 and 1161; 1162 and 1163; 1164 and 1165; 1166 and 1167; 1168 and 1169; 4509 and 4510; 4511 and 4512; 4513 and 4514; 4515 and 4516; 4517 and 4518; 4519 and 4520; 4521 and 4522; 4523 and 4524; 4525 and 4526; 4527 and 4528; 4529 and 4530; 4531 and 4532; 4533 and 4534; 4535 and 4536; 4537 and 4538; 4539 and 4540; 4541 and 4542; 4543 and 4544; 4545 and 4546; 4547 and 4548; 4549 and 4550; 4551 and 4552; 4553 and 4554; 4555 and 4556; 4557 and 4558; 4559 and 4560; 4561 and 4562; 4563 and 4564; 4565 and 4566; 4567 and 4568; 4569 and 4570; 4571 and 4572; 4573 and 4574; 4575 and 4576; 4577 and 4578; 4579 and 4580; 4581 and 4582; 4583 and 4584; 4585 and 4586; 4587 and 4588; 4589 and 4590; 4591 and 4592; 4593 and 4594; 4595 and 4596; 4597 and 4598; 4599 and 4600; 4601 and 4602; 4603 and 4604; 4605 and 4606; 4607 and 4608; 1186 and 1187; 1188 and 1189; 1190 and 1191; 1192 and 1193; 1194 and 1195; 1196 and 1197; 1198 and 1199; 1200 and 1201; 1202 and 1203; 1204 and 1205; 1206 and 1207; 1208 and 1209; 1210 and 1211; 1212 and 1213; 1214 and 1215; 1216 and 1217; 1218 and 1219; 1220 and 1221; 1222 and 1223; 1224 and 1225; 1226 and 1227; 1228 and 1229; 1230 and 1231; 1232 and 1233; 1234 and 1235; 1236 and 1237; 1238 and 1239; 1240 and 1241; 1242 and 1243; 1244 and 1245; 1246 and 1247; 1248 and 1249; 4309 and 4310; 4311 and 4312; 4313 and 4314; 4315 and 4316; 4317 and 4318; 4319 and 4320; 4321 and 4322; 4323 and 4324; 4325 and 4326; 4327 and 4328; 4329 and 4330; 4331 and 4332; 4333 and 4334; 4335 and 4336; 4337 and 4338; 4339 and 4340; 4341 and 4342; 4343 and 4344; 4345 and 4346; 4347 and 4348; 4349 and 4350; 4351 and 4352; 4353 and 4354; 4355 and 4356; 4357 and 4358; 4359 and 4360; 4361 and 4362; 4363 and 4364; 4365 and 4366; 4367 and 4368; 4369 and 4370; 4371 and 4372; 4373 and 4374; 4375 and 4376; 4377 and 4378; 4379 and 4380; 4381 and 4382; 4383 and 4384; 4385 and 4386; 4387 and 4388; 4389 and 4390; 4391 and 4392; 4393 and 4394; 4395 and 4396; 4397 and 4398; 4399 and 4400; 4401 and 4402; 4403 and 4404; 4405 and 4406; 4407 and 4408; 4409 and 4410; 4411 and 4412; 4413 and 4414; 4415 and 4416; 4417 and 4418; 4419 and 4420; 4421 and 4422; 4423 and 4424; 4425 and 4426; 4427 and 4428; 4429 and 4430; 4431 and 4432; 4433 and 4434; 4435 and 4436; 4437 and 4438; 4439 and 4440; 4441 and 4442; 4443 and 4444; 4445 and 4446; 4447 and 4448; 4449 and 4450; 4451 and 4452; 4453 and 4454; 4455 and 4456; 4457 and 4458; 4459 and 4460; 4461 and 4462; 4463 and 4464; 4465 and 4466; 4467 and 4468; 4469 and 4470; 4471 and 4472; 4473 and 4474; 4475 and 4476; 4477 and 4478; 4479 and 4480; 4481 and 4482; 4483 and 4484; 4485 and 4486; 4487 and 4488; 4489 and 4490; 4491 and 4492; 4493 and 4494; 4495 and 4496; 4497 and 4498; 4499 and 4500; 4501 and 4502; 4503 and 4504; 4505 and 4506; 4507 and 4508; 1269 and 1270; 1271 and 1272; 1273 and 1274; 1275 and 1276; 1277 and 1278; 1279 and 1280; 1281 and 1282; 1283 and 1284; 1285 and 1286; 1287 and 1288; 1289 and 1290; 1291 and 1292; 1293 and 1294; 1295 and 1296; 1297 and 1298; 1299 and 1300; 1301 and 1302; 1303 and 1304; 1305 and 1306; 1307 and 1308; 1309 and 1310; 1311 and 1312; 1313 and 1314; 1315 and 1316; 1317 and 1318; 1319 and 1320; 1321 and 1322; 1323 and 1324; 1325 and 1326; 1327 and 1328; 1329 and 1330; 1331 and 1332; 1333 and 1334; 1335 and 1336; 1337 and 1338; 1339 and 1340; 1341 and 1342; 1343 and 1344; 4709 and 4710; 4711 and 4712; 4713 and 4714; 4715 and 4716; 4717 and 4718; 4719 and 4720; 4721 and 4722; 4723 and 4724; 4725 and 4726; 4727 and 4728; 4729 and 4730; 4731 and 4732; 4733 and 4734; 4735 and 4736; 4737 and 4738; 4739 and 4740; 4741 and 4742; 4743 and 4744; 4745 and 4746; 4747 and 4748; 4749 and 4750; 4751 and 4752; 4753 and 4754; 4755 and 4756; 4757 and 4758; 4759 and 4760; 4761 and 4762; 4763 and 4764; 4765 and 4766; 4767 and 4768; 4769 and 4770; 4771 and 4772; 4773 and 4774; 4775 and 4776; 4777 and 4778; 4779 and 4780; 4781 and 4782; 4783 and 4784; 4785 and 4786; 4787 and 4788; 4789 and 4790; 4791 and 4792; 4793 and 4794; 4795 and 4796; 4797 and 4798; 4799 and 4800; 4801 and 4802; 4803 and 4804; 4805 and 4806; 4807 and 4808; 4809 and 4810; 4811 and 4812; 4813 and 4814; 4815 and 4816; 4817 and 4818; 4819 and 4820; 4821 and 4822; 4823 and 4824; 4825 and 4826; 4827 and 4828; 4829 and 4830; 4831 and 4832; 4833 and 4834; 4835 and 4836; 4837 and 4838; 4839 and 4840; 4841 and 4842; 4843 and 4844; 4845 and 4846; 4847 and 4848; 4849 and 4850; 4851 and 4852; 4853 and 4854; 4855 and 4856; 4857 and 4858; 4859 and 4860; 4861 and 4862; 4863 and 4864; 4865 and 4866; 4867 and 4868; 4869 and 4870; 4871 and 4872; 4873 and 4874; 4875 and 4876; 4877 and 4878; 4879 and 4880; 4881 and 4882; 4883 and 4884; 4885 and 4886; 4887 and 4888; 4889 and 4890; 4891 and 4892; 4893 and 4894; 4895 and 4896; 4897 and 4898; 4899 and 4900; 4901 and 4902; 4903 and 4904; 4905 and 4906; 4907 and 4908; 1361 and 1362; 1363 and 1364; 1365 and 1366; 1367 and 1368; 1369 and 1370; 1371 and 1372; 1373 and 1374; 1375 and 1376; 1377 and 1378; 1379 and 1380; 1381 and 1382; 1383 and 1384; 1385 and 1386; 1387 and 1388; 1389 and 1390; 1393 and 1394; 1395 and 1396; 1397 and 1398; 1399 and 1400; 1401 and 1402; 1403 and 1404; 1405 and 1406; 1407 and 1408; 1409 and 1410; 1411 and 1412; 1413 and 1414; 1415 and 1416; 1417 and 1418; 1419 and 1420; 1421 and 1422; 5075 and 5076; 5077 and 5078; 5079 and 5080; 5081 and 5082; 5083 and 5084; 5085 and 5086; 5087 and 5088; 5089 and 5090; 5091 and 5092; 5093 and 5094; 5095 and 5096; 5097 and 5098; 5099 and 5100; 5101 and 5102; 5103 and 5104; 5105 and 5106; 5107 and 5108; 5109 and 5110; 5111 and 5112; 5113 and 5114; 1436 and 1437; 1438 and 1439; 1440 and 1441; 1442 and 1443; 1444 and 1445; 1446 and 1447; 1448 and 1449; 1450 and 1451; 1452 and 1453; 1454 and 1455; 1456 and 1457; 1458 and 1459; 1460 and 1461; 1462 and 1463; 1464 and 1465; 1466 and 1467; 1468 and 1469; 1470 and 1471; 1472 and 1473; 1474 and 1475; 1476 and 1477; 1478 and 1479; 5115 and 5116; 5117 and 5118; 5119 and 5120; 5121 and 5122; 5123 and 5124; 5125 and 5126; 5127 and 5128; 5129 and 5130; 5131 and 5132; 5133 and 5134; 5135 and 5136; 5137 and 5138; 5139 and 5140; 5141 and 5142; 5143 and 5144; 5145 and 5146; 5147 and 5148; 5149 and 5150; 5151 and 5152; 5153 and 5154; 5155 and 5156; 5157 and 5158; 5159 and 5160; 5161 and 5162; 5163 and 5164; 5165 and 5166; 5167 and 5168; 5169 and 5170; 5171 and 5172; 5173 and 5174; 5175 and 5176; 5177 and 5178; 5179 and 5180; 5181 and 5182; 5183 and 5184; 5185 and 5186; 5187 and 5188; 5189 and 5190; 5191 and 5192; 5193 and 5194; 5195 and 5196; 5197 and 5198; 5199 and 5200; 5201 and 5202; 5203 and 5204; 5205 and 5206; 5207 and 5208; 5209 and 5210; 5211 and 5212; 5213 and 5214; 1501 and 1502; 1503 and 1504; 1505 and 1506; 1507 and 1508; 1509 and 1510; 1511 and 1512; 1513 and 1514; 1515 and 1516; 1517 and 1518; 1519 and 1520; 1521 and 1522; 1523 and 1524; 1525 and 1526; 1527 and 1528; 1529 and 1530; 1531 and 1532; 1533 and 1534; 1535 and 1536; 1537 and 1538; 1539 and 1540; 1541 and 1542; 1543 and 1544; 1545 and 1546; 1547 and 1548; 1549 and 1550; 1551 and 1552; 1553 and 1554; 1555 and 1556; 1557 and 1558; 1559 and 1560; 1561 and 1562; 1563 and 1564; 1565 and 1566; 1567 and 1568; 1569 and 1570; 1571 and 1572; 1573 and 1574; 1575 and 1576; 1577 and 1578; 1579 and 1580; 1581 and 1582; 1583 and 1584; 5519 and 5520; 5521 and 5522; 5523 and 5524; 5525 and 5526; 5527 and 5528; 5529 and 5530; 5531 and 5532; 5533 and 5534; 5535 and 5536; 5537 and 5538; 5539 and 5540; 5541 and 5542; 5543 and 5544; 5545 and 5546; 5547 and 5548; 5549 and 5550; 5551 and 5552; 5553 and 5554; 5555 and 5556; 5557 and 5558; 5559 and 5560; 5561 and 5562; 5563 and 5564; 5565 and 5566; 5567 and 5568; 5569 and 5570; 5571 and 5572; 5573 and 5574; 5575 and 5576; 5577 and 5578; 5579 and 5580; 5581 and 5582; 5583 and 5584; 5585 and 5586; 5587 and 5588; 5589 and 5590; 5591 and 5592; 5593 and 5594; 5595 and 5596; 5597 and 5598; 5599 and 5600; 5601 and 5602; 5603 and 5604; 5605 and 5606; 5607 and 5608; 5609 and 5610; 5611 and 5612; 5613 and 5614; 5615 and 5616; 5617 and 5618; 5619 and 5620; 5621 and 5622; 5623 and 5624; 5625 and 5626; 5627 and 5628; 5629 and 5630; 5631 and 5632; 5633 and 5634; 5635 and 5636; 5637 and 5638; 5639 and 5640; 5641 and 5642; 5643 and 5644; 5645 and 5646; 5647 and 5648; 5649 and 5650; 5651 and 5652; 5653 and 5654; 5655 and 5656; 5657 and 5658; 5659 and 5660; 5661 and 5662; 5663 and 5664; 5665 and 5666; 5667 and 5668; 5669 and 5670; 5671 and 5672; 5673 and 5674; 5675 and 5676; 5677 and 5678; 5679 and 5680; 5681 and 5682; 5683 and 5684; 5685 and 5686; 5687 and 5688; 5689 and 5690; 5691 and 5692; 5693 and 5694; 5695 and 5696; 5697 and 5698; 5699 and 5700; 5701 and 5702; 5703 and 5704; 5705 and 5706; 5707 and 5708; 5709 and 5710; 5711 and 5712; 5713 and 5714; 5715 and 5716; 5717 and 5718; 1612 and 1613; 1614 and 1615; 1616 and 1617; 1618 and 1619; 1620 and 1621; 1622 and 1623; 1624 and 1625; 1626 and 1627; 1628 and 1629; 1630 and 1631; 1632 and 1633; 1634 and 1635; 1636 and 1637; 1638 and 1639; 5719 and 5720; 5721 and 5722; 5723 and 5724; 5725 and 5726; 5727 and 5728; 5729 and 5730; 5731 and 5732; 5733 and 5734; 5735 and 5736; 5737 and 5738; 5739 and 5740; 5741 and 5742; 5743 and 5744; 5745 and 5746; 5747 and 5748; 5749 and 5750; 5751 and 5752; 5753 and 5754; 5755 and 5756; 5757 and 5758; 5759 and 5760; 5761 and 5762; 5763 and 5764; 5765 and 5766; 5767 and 5768; 5769 and 5770; 5771 and 5772; 5773 and 5774; 5775 and 5776; 5777 and 5778; 5779 and 5780; 5781 and 5782; 5783 and 5784; 5785 and 5786; 5787 and 5788; 5789 and 5790; 1648 and 1649; 1650 and 1651; 1652 and 1653; 1654 and 1655; 1656 and 1657; 1658 and 1659; 1660 and 1661; 1662 and 1663; 1664 and 1665; 1666 and 1667; 1668 and 1669; 1670 and 1671; 1672 and 1673; 1674 and 1675; 1676 and 1677; 1678 and 1679; 3139 and 3140; 3141 and 3142; 3143 and 3144; 3145 and 3146; 3147 and 3148; 3149 and 3150; 3151 and 3152; 3153 and 3154; 3155 and 3156; 3157 and 3158; 3159 and 3160; 3161 and 3162; 3163 and 3164; 3165 and 3166; 3167 and 3168; 3169 and 3170; 3171 and 3172; 3173 and 3174; 3175 and 3176; 3177 and 3178; 3179 and 3180; 3181 and 3182; 3183 and 3184; 3185 and 3186; 3187 and 3188; 3189 and 3190; 3191 and 3192; 3193 and 3194; 3195 and 3196; 3197 and 3198; 3199 and 3200; 3201 and 3202; 3203 and 3204; 3205 and 3206; 3207 and 3208; 3209 and 3210; 3211 and 3212; 3213 and 3214; 3215 and 3216; 1691 and 1692; 1693 and 1694; 1695 and 1696; 1697 and 1698; 1699 and 1700; 1701 and 1702; 1703 and 1704; 1705 and 1706; 1707 and 1708; 1709 and 1710; 1711 and 1712; 1713 and 1714; 1715 and 1716; 1717 and 1718; 1719 and 1720; 1721 and 1722; 1723 and 1724; 1725 and 1726; 1727 and 1728; 1729 and 1730; 1731 and 1732; 1733 and 1734; 2261 and 2262; 2263 and 2264; 2265 and 2266; 2267 and 2268; 2269 and 2270; 2271 and 2272; 2273 and 2274; 2275 and 2276; 2277 and 2278; 2279 and 2280; 2281 and 2282; 2283 and 2284; 2285 and 2286; 2287 and 2288; 2289 and 2290; 2291 and 2292; 2293 and 2294; 2295 and 2296; 2297 and 2298; 2299 and 2300; 2301 and 2302; 2303 and 2304; 2305 and 2306; 2307 and 2308; 2309 and 2310; 2311 and 2312; 2313 and 2314; 2315 and 2316; 2317 and 2318; 2319 and 2320; 2321 and 2322; 2323 and 2324; 2325 and 2326; 2327 and 2328; 2329 and 2330; 2331 and 2332; 2333 and 2334; 2335 and 2336; 2337 and 2338; 2339 and 2340; 2341 and 2342; 2343 and 2344; 2345 and 2346; 2347 and 2348; 2349 and 2350; 2351 and 2352; 2353 and 2354; 2355 and 2356; 2357 and 2358; 2359 and 2360; 1752 and 1753; 1754 and 1755; 1756 and 1757; 1758 and 1759; 1760 and 1761; 1762 and 1763; 1764 and 1765; 1766 and 1767; 1768 and 1769; 1770 and 1771; 1772 and 1773; 1774 and 1775; 1776 and 1777; 1778 and 1779; 1780 and 1781; 1782 and 1783; 1784 and 1785; 1786 and 1787; 1788 and 1789; 1790 and 1791; 1792 and 1793; 1794 and 1795; 1796 and 1797; 1798 and 1799; 1800 and 1801; 1802 and 1803; 1804 and 1805; 1806 and 1807; 1808 and 1809; 1810 and 1811; 1812 and 1813; 1814 and 1815; 1816 and 1817; 1818 and 1819; 4909 and 4910; 4911 and 4912; 4913 and 4914; 4915 and 4916; 4917 and 4918; 4919 and 4920; 4921 and 4922; 4923 and 4924; 4925 and 4926; 4927 and 4928; 4929 and 4930; 4931 and 4932; 4933 and 4934; 4935 and 4936; 4937 and 4938; 4939 and 4940; 4941 and 4942; 4943 and 4944; 4945 and 4946; 4947 and 4948; 4949 and 4950; 4951 and 4952; 4953 and 4954; 4955 and 4956; 4957 and 4958; 4959 and 4960; 4961 and 4962; 4963 and 4964; 4965 and 4966; 4967 and 4968; 4969 and 4970; 4971 and 4972; 4973 and 4974; 4975 and 4976; 4977 and 4978; 4979 and 4980; 4981 and 4982; 4983 and 4984; 4985 and 4986; 4987 and 4988; 4989 and 4990; 4991 and 4992; 4993 and 4994; 4995 and 4996; 4997 and 4998; 4999 and 5000; 5001 and 5002; 5003 and 5004; 5005 and 5006; 5007 and 5008; 5009 and 5010; 5011 and 5012; 5013 and 5014; 5015 and 5016; 5017 and 5018; 5019 and 5020; 5021 and 5022; 5023 and 5024; 5025 and 5026; 5027 and 5028; 5029 and 5030; 5031 and 5032; 5033 and 5034; 5035 and 5036; 5037 and 5038; 5039 and 5040; 5041 and 5042; 5043 and 5044; 5045 and 5046; 5047 and 5048; 5049 and 5050; 5051 and 5052; 5053 and 5054; 5055 and 5056; 5057 and 5058; 5059 and 5060; 5061 and 5062; 5063 and 5064; 5065 and 5066; 5067 and 5068; 5069 and 5070; 5071 and 5072; 5073 and 5074; 1834 and 1835; 1836 and 1837; 1838 and 1839; 1840 and 1841; 1842 and 1843; 1844 and 1845; 1846 and 1847; 1848 and 1849; 1850 and 1851; 1852 and 1853; 1854 and 1855; 1856 and 1857; 1858 and 1859; 1860 and 1861; 1862 and 1863; 1864 and 1865; 1866 and 1867; 1868 and 1869; 1870 and 1871; 1872 and 1873; 1874 and 1875; 1876 and 1877; 1878 and 1879; 1880 and 1881; 1882 and 1883; 1884 and 1885; 1886 and 1887; 1888 and 1889; 2161 and 2162; 2163 and 2164; 2165 and 2166; 2167 and 2168; 2169 and 2170; 2171 and 2172; 2173 and 2174; 2175 and 2176; 2177 and 2178; 2179 and 2180; 2181 and 2182; 2183 and 2184; 2185 and 2186; 2187 and 2188; 2189 and 2190; 2191 and 2192; 2193 and 2194; 2195 and 2196; 2197 and 2198; 2199 and 2200; 2201 and 2202; 2203 and 2204; 2205 and 2206; 2207 and 2208; 2209 and 2210; 2211 and 2212; 2213 and 2214; 2215 and 2216; 2217 and 2218; 2219 and 2220; 2221 and 2222; 2223 and 2224; 2225 and 2226; 2227 and 2228; 2229 and 2230; 2231 and 2232; 2233 and 2234; 2235 and 2236; 2237 and 2238; 2239 and 2240; 2241 and 2242; 2243 and 2244; 2245 and 2246; 2247 and 2248; 2249 and 2250; 2251 and 2252; 2253 and 2254; 2255 and 2256; 2257 and 2258; 2259 and 2260; 1899 and 1900: 1901 and 1902: 1903 and 1904:1905 and 1906:1907 and 1908: 1909 and 1910: 1911 and 1912: 1913 and 1914: 1915 and 1916: 1917 and 1918: 1919 and 1920: 1921 and 1922: 1923 and 1924: 1925 and 1926: 1927 and 1928: 1929 and 1930: 1931 and 1932: 1933 and 1934: 3217 and 3218: 3219 and 3220: 3221 and 3222: 3223 and 3224: 3225 and 3226: 3227 and 3228: 3229 and 3230: 3231 and 3232: 3233 and 3234: 3235 and 3236: 3237 and 3238: 3239 and 3240: 3241 and 3242: 3243 and 3244: 3245 and 3246: 3247 and 3248: 3249 and 3250: 3251 and 3252: 3253 and 3254: 3255 and 3256: 3257 and 3258: 3259 and 3260: 3261 and 3262: 3263 and 3264: 3265 and 3266: 3267 and 3268: 3269 and 3270: 3271 and 3272: 3273 and 3274: 3275 and 3276: 3277 and 3278: 3279 and 3280: 3281 and 3282: 3283 and 3284: 3285 and 3286; 1952 and 1953; 1954 and 1955; 1956 and 1957; 1958 and 1959; 1960 and 1961; 1962 and 1963; 1964 and 1965; 1966 and 1967; 1968 and 1969; 1970 and 1971; 1972 and 1973; 1974 and 1975; 1976 and 1977; 1978 and 1979; 1980 and 1981; 1982 and 1983; 1984 and 1985; 1986 and 1987; 1988 and 1989; 1990 and 1991; 1992 and 1993; 1994 and 1995; 1996 and 1997; 1998 and 1999; 2000 and 2001; 2002 and 2003; 2004 and 2005; 2006 and 2007; 2008 and 2009; 2010 and 2011; 2012 and 2013; 2014 and 2015; 2016 and 2017; 2018 and 2019; 3287 and 3288; 3289 and 3290; 3291 and 3292; 3293 and 3294; 3295 and 3296; 3297 and 3298; 3299 and 3300; 3301 and 3302; 3303 and 3304; 3305 and 3306; 3307 and 3308; 3309 and 3310; 3311 and 3312; 3313 and 3314; 3315 and 3316; 3317 and 3318; 3319 and 3320; 3321 and 3322; 3323 and 3324; 3325 and 3326; 3327 and 3328; 3329 and 3330; 3331 and 3332; 3333 and 3334; 3335 and 3336; 3337 and 3338; 3339 and 3340; 3341 and 3342; 3343 and 3344; 3345 and 3346; 3347 and 3348; 3349 and 3350; 3351 and 3352; 3353 and 3354; 3355 and 3356; 3357 and 3358; 3359 and 3360; 3361 and 3362; 3363 and 3364; 3365 and 3366; 3367 and 3368; 3369 and 3370; 3371 and 3372; 3373 and 3374; 3375 and 3376; 3377 and 3378; 3379 and 3380; 3381 and 3382; 3383 and 3384; 3385 and 3386; 3387 and 3388; 3389 and 3390; 3391 and 3392; 3393 and 3394; 3395 and 3396.

12. The saRNA of claim 8, wherein at least one of the sense strand or the antisense strand of the saRNA comprises a 3′ tail.

13. The saRNA of claim 8, wherein the antisense strand and the sense strand independently comprise at least one modification.

14. A pharmaceutical composition comprising the saRNA of claim 1 and at least one pharmaceutically acceptable excipient.

15. A method of modulating the expression of a target protein, comprising administering the saRNA of claim 1.

16. The method of claim 15, wherein the expression of the target protein is increased.

17. The method of claim 16, wherein the expression of the target protein is increased by at least 30%.

18. The method of claim 17, wherein the expression of the target protein is increased by at least 50%.
